United States Patent Application Publication US 2020/0392482 A1 - sequence listing, part 5

SEQ ID NO: 1634 - DNA, 4000 bp, Escherichia coli
  misc_feature (592)..(592): n is a, c, g, or t
  misc_feature (2152)..(2152): n is a, c, g, or t
  misc_feature (2423)..(2423): n is a, c, g, or t
  misc_feature (3348)..(3348): n is a, c, g, or t
  misc_feature (3435)..(3435): n is a, c, g, or t
tgacgtagctgcaatatcttcaacactcacaaacccctcagcaacaagcagatgagcgataacatcatcaatattcaatgcttctatgaaacgggttgagcgggttttgaattcttcctgacgacgctctgattcttcagcttctgtcagaatatcgatataccagccagttaattgagaggcgaggcggacattctgaccgcggcgaccaatggcaagactaagctgttcgtccggcacaacaacctcaacccggcctgcaacttcatcaacaacaaccttggcaacttctgccggagcaagagcgttcacgatgaaggtgacgggatcttctgagaaaggaataatctcaatcttttcaccctgcaattcaccaacaactgcctgaacacggctaccgcgaagaccaacacaagcgccaacggggtcaatgctgctatcacgtgatacaacagaaatcttcgctcggcttcccggctctcttgcaacagccttaatttcgataatgccgtcataaatctcaggcacttcttgaacaaatagctttgccataaattcgtttgctgcccgtgataggaaaatctgagggccncgaggctcttcgcgcacatcaacaatataggcgcgcactctatcgccctgattgaaattttcacgtggaatcatctggtcacggcgtatcacgccttcagcgcggccaaggtcaacagtgatagaatagctctcagcacgttttacggtaccaataacaacttccccaacacggtccttatattcctgatattggcgcgcccgctcagcttcacgcactttttgcgagataacctgttttgctgtctgggctgcaatccggccaaattcaatggggggaagtggctggcgcaaaaattcgccaagaccaacctggtgtttagtgccttcagtcacagtcatctgggtttcgtcattctcgacttcttcgacaacttcagtccaacgctcaagatggatagagccagttttacgatcgatcatagcgcgaatatcacggtcattaccgtatttcgagcgtcccgctttttgaatagcttcttccatcgcaatgatgacctcttcgcggtcaatcgatttctcacgcgccaccacatctgcaatttgcatcaattcaagtccgggaatagatgatgtatccataacgtctgtcctttttatattatctcttatgagccccccatgggctgataagacatttatcttctctaataactagccagcatctgtttctgatgaagccttatcatcctgtgcgctagcatccttagccttattttttttctcgtctcttcggagctgctgtttcagcgttgagaaaaattcggtcgggtcaattttggccgtatctatttcctcaaaggcaaaactaacacgccctgttcctgtatccagatggattaagttaccttcatctacgccaccaagccgaccacgaaaacgtttttggccattacgcgcctgtaatagtgaaaccttagcaagctcgccggaaaaacgggtaaaatctgcaagacgggtaagcggtctatccattccaggagagctcacctcaagctgataggcttcacttatcgggtcttcaacatccagaacagcggcaagctgacggctaatcagcgtgcaatcttcaaccgtcatttcacggctttcgattggttcagccataatctggagctgagagcgcgcttttccgtctgcgccaacgcctgaaaaacggacgcgcacaagcgaaaaccccaaatcgtttagggtcggttcgattatcttattaagcttttcagagaccatccctgccctgctcttttacaatttattatatttagggtcgttaaccttagtgtcactgcgtttcgtgtttgccataatcgcatgtagccaaccaagaaggcgggcacttttaggcaacaaaaaaggcgggcttttggcccaccgcttcaaaagaaaccgtcatgtgatgcttgtcttacgccacattcatgcaaaaagcaagtcacgcaccttatcgacgcgcaaaatcaaaccagcttgacgcacggccttccctggtccccttcgccatatagcgcgtttcaggccagttttcaggacggcggcgccagtcagctgcggtttctgcgcnccactcaaaagcaggatggcgcatggcttctgctaacagccatgtctttgctatcggatgatcacttgccatccgaagaaagccgcccggcgcaaccaagcgggcaaggctatcaagcattttttgagacagaatgcgacgatatgcatgccgtcgtttcggccatggatcgggaaacatcacataaacaccgtcaagacagcccggttccatgacttcaagcaaggggcgcacatcatcagaccagatacgaatattgctcagctcatgntcatctatctggcgcacaaggctcgccaccccgttgatgaatggctcagcgccgataaatcctgcctgcggattgccagcagcaagttgagcaagatgctcacctcccccaaaaccgatttccagaaataacgcgtccttatgactatcaaactggcttgcaagcggtgcagatgttagggctgccttatcaacagagagacgcggtagttctgtgctcagtagctgcttcatatgggcgcttagcgcgcgcccttttcgcctaccataaaaatgatagtccggaagagacgatggccgcgtgcctgtcatcaaagtgacctttttctgtctttagccacgataagcaacgctacagacttgccttaatcgcatcaaccaaatcggttgcttcccagctaaatgtacctgcgcccgcttcgcctgcttttctgccaaaatggccatatgcagatgtcggtgtgtaaattgcattattcagaccaagatgcgtgcgaatcccttgcggccgtaaatccatgatatcacctttggtaaacagagcggcaagaatggcatctgatacagtgcccgtaccatggctatttacatagacagaaaccggggctgcaacaccaatggcgtaggcaatctggatcgtacatttttcagcaagaccacttgcaacaacgtttttcgcaagatagcgcgcagcataggcagctgaccggtcaacttttgttgggtcttttcctgaaaacgcgccgccaccatgaggcgcagcaccgccataggtatcaacaatgattttgcggcccgtcagtccagcatcaccatccggtccaccaataacaaaattacctgttggattaatcagaaagtccttagcgccaaccatccagccatctggcaggagctctgctgcaagaggggttatcagcgctctnatatccgcttcactcacaccttctttatgctgggtagacacaacaagcgtttcaacaccctcgatgctgccatcatctgcgtagcgnagggttatctggcttttcgcatcaggtccaagaatactatcagcatcctgtttacgcagatctgccatttgtttcagaagctgatgggcataatgaatcggagccggcattaactcttctgtttcaccgcacgcatagccaaacatcaagccctgatcaccagcgccttcttccttattatcagagctatcaacaccagcagcaatatcagcagactgctcatgcaaataattctgaaattcaaaatgagcatggtggaatttttcctgctcatatccaatgtcagcaatcgctccgcgtacctcagcttctatctgttccataatggagggcatattatctttagacgcacgaacctcgccagcaagaacaatcctatttgtcgtcgctagtgtctcacaagctactctggcttcgctttcatgacgaagaaacaaatcgagtacagtatcagagacacggtcacaaactttatccggatgaccttcggatactgattcagaggtaaaaagataagccaaaataaccctcgcagacgctgttcatattagatttttaagcatat

SEQ ID NO: 1635 - DNA, 4000 bp, Escherichia coli
  misc_feature (1)..(1): n is a, c, g, or t
  misc_feature (5)..(5): n is a, c, g, or t
  misc_feature (8)..(10): n is a, c, g, or t
  misc_feature (12)..(14): n is a, c, g, or t
  misc_feature (16)..(33): n is a, c, g, or t
  misc_feature (36)..(47): n is a, c, g, or t
  misc_feature (49)..(65): n is a, c, g, or t
  misc_feature (68)..(89): n is a, c, g, or t
  misc_feature (91)..(110): n is a, c, g, or t
  misc_feature (112)..(118): n is a, c, g, or t
  misc_feature (120)..(122): n is a, c, g, or t
  misc_feature (124)..(139): n is a, c, g, or t
  misc_feature (141)..(165): n is a, c, g, or t
  misc_feature (167)..(193): n is a, c, g, or t
  misc_feature (195)..(206): n is a, c, g, or t
  misc_feature (208)..(208): n is a, c, g, or t
  misc_feature (210)..(259): n is a, c, g, or t
  misc_feature (261)..(278): n is a, c, g, or t
  misc_feature (280)..(284): n is a, c, g, or t
  misc_feature (286)..(288): n is a, c, g, or t
  misc_feature (291)..(306): n is a, c, g, or t
  misc_feature (308)..(319): n is a, c, g, or t
  misc_feature (321)..(322): n is a, c, g, or t
  misc_feature (324)..(329): n is a, c, g, or t
  misc_feature (331)..(332): n is a, c, g, or t
  misc_feature (334)..(339): n is a, c, g, or t
  misc_feature (341)..(367): n is a, c, g, or t
  misc_feature (369)..(375): n is a, c, g, or t
  misc_feature (377)..(391): n is a, c, g, or t
  misc_feature (393)..(393): n is a, c, g, or t
  misc_feature (396)..(396): n is a, c, g, or t
  misc_feature (398)..(400): n is a, c, g, or t
  misc_feature (402)..(427): n is a, c, g, or t
  misc_feature (430)..(431): n is a, c, g, or t
  misc_feature (433)..(438): n is a, c, g, or t
  misc_feature (440)..(452): n is a, c, g, or t
  misc_feature (454)..(460): n is a, c, g, or t
  misc_feature (462)..(511): n is a, c, g, or t
  misc_feature (513)..(514): n is a, c, g, or t
  misc_feature (516)..(525): n is a, c, g, or t
  misc_feature (527)..(532): n is a, c, g, or t
  misc_feature (534)..(554): n is a, c, g, or t
  misc_feature (556)..(559): n is a, c, g, or t
  misc_feature (561)..(573): n is a, c, g, or t
  misc_feature (577)..(581): n is a, c, g, or t
  misc_feature (583)..(587): n is a, c, g, or t
  misc_feature (589)..(590): n is a, c, g, or t
  misc_feature (592)..(592): n is a, c, g, or t
  misc_feature (594)..(595): n is a, c, g, or t
  misc_feature (598)..(598): n is a, c, g, or t
  misc_feature (600)..(601): n is a, c, g, or t
  misc_feature (604)..(604): n is a, c, g, or t
  misc_feature (606)..(606): n is a, c, g, or t
  misc_feature (608)..(612): n is a, c, g, or t
  misc_feature (615)..(618): n is a, c, g, or t
  misc_feature (621)..(622): n is a, c, g, or t
  misc_feature (624)..(626): n is a, c, g, or t
  misc_feature (628)..(628): n is a, c, g, or t
  misc_feature (630)..(633): n is a, c, g, or t
  misc_feature (635)..(637): n is a, c, g, or t
  misc_feature (639)..(639): n is a, c, g, or t
  misc_feature (641)..(644): n is a, c, g, or t
  misc_feature (646)..(652): n is a, c, g, or t
  misc_feature (654)..(654): n is a, c, g, or t
  misc_feature (656)..(656): n is a, c, g, or t
  misc_feature (658)..(674): n is a, c, g, or t
  misc_feature (676)..(680): n is a, c, g, or t
  misc_feature (682)..(692): n is a, c, g, or t
  misc_feature (694)..(703): n is a, c, g, or t
  misc_feature (705)..(706): n is a, c, g, or t
  misc_feature (709)..(709): n is a, c, g, or t
  misc_feature (711)..(724): n is a, c, g, or t
  misc_feature (726)..(731): n is a, c, g, or t
  misc_feature (733)..(733): n is a, c, g, or t
  misc_feature (735)..(737): n is a, c, g, or t
  misc_feature (741)..(744): n is a, c, g, or t
  misc_feature (746)..(761): n is a, c, g, or t
  misc_feature (763)..(767): n is a, c, g, or t
  misc_feature (769)..(770): n is a, c, g, or t
  misc_feature (772)..(779): n is a, c, g, or t
  misc_feature (781)..(781): n is a, c, g, or t
  misc_feature (785)..(785): n is a, c, g, or t
  misc_feature (787)..(788): n is a, c, g, or t
  misc_feature (790)..(797): n is a, c, g, or t
  misc_feature (800)..(800): n is a, c, g, or t
  misc_feature (802)..(802): n is a, c, g, or t
  misc_feature (805)..(805): n is a, c, g, or t
  misc_feature (807)..(808): n is a, c, g, or t
  misc_feature (810)..(814): n is a, c, g, or t
  misc_feature (816)..(817): n is a, c, g, or t
  misc_feature (820)..(828): n is a, c, g, or t
  misc_feature (830)..(834): n is a, c, g, or t
  misc_feature (836)..(855): n is a, c, g, or t
  misc_feature (857)..(857): n is a, c, g, or t
  misc_feature (859)..(866): n is a, c, g, or t
  misc_feature (869)..(872): n is a, c, g, or t
  misc_feature (874)..(875): n is a, c, g, or t
  misc_feature (877)..(878): n is a, c, g, or t
  misc_feature (880)..(881): n is a, c, g, or t
  misc_feature (883)..(884): n is a, c, g, or t
  misc_feature (886)..(904): n is a, c, g, or t
  misc_feature (906)..(912): n is a, c, g, or t
  misc_feature (914)..(914): n is a, c, g, or t
  misc_feature (916)..(921): n is a, c, g, or t
  misc_feature (923)..(927): n is a, c, g, or t
  misc_feature (929)..(933): n is a, c, g, or t
  misc_feature (935)..(935): n is a, c, g, or t
  misc_feature (937)..(953): n is a, c, g, or t
  misc_feature (955)..(956): n is a, c, g, or t
  misc_feature (958)..(959): n is a, c, g, or t
  misc_feature (961)..(966): n is a, c, g, or t
  misc_feature (969)..(974): n is a, c, g, or t
  misc_feature (976)..(979): n is a, c, g, or t
  misc_feature (982)..(988): n is a, c, g, or t
  misc_feature (992)..(995): n is a, c, g, or t
  misc_feature (997)..(1007): n is a, c, g, or t
  misc_feature (1009)..(1021): n is a, c, g, or t
  misc_feature (1023)..(1023): n is a, c, g, or t
  misc_feature (1025)..(1039): n is a, c, g, or t
  misc_feature (1041)..(1041): n is a, c, g, or t
  misc_feature (1044)..(1046): n is a, c, g, or t
  misc_feature (1048)..(1051): n is a, c, g, or t
  misc_feature (1053)..(1055): n is a, c, g, or t
  misc_feature (1058)..(1058): n is a, c, g, or t
  misc_feature (1060)..(1064): n is a, c, g, or t
  misc_feature (1066)..(1073): n is a, c, g, or t
  misc_feature (1075)..(1077): n is a, c, g, or t
  misc_feature (1079)..(1080): n is a, c, g, or t
  misc_feature (1082)..(1082): n is a, c, g, or t
  misc_feature (1084)..(1086): n is a, c, g, or t
  misc_feature (1088)..(1088): n is a, c, g, or t
  misc_feature (1090)..(1096): n is a, c, g, or t
  misc_feature (1098)..(1098): n is a, c, g, or t
  misc_feature (1100)..(1106): n is a, c, g, or t
  misc_feature (1108)..(1109): n is a, c, g, or t
  misc_feature (1111)..(1115): n is a, c, g, or t
  misc_feature (1117)..(1121): n is a, c, g, or t
  misc_feature (1123)..(1128): n is a, c, g, or t
  misc_feature (1130)..(1137): n is a, c, g, or t
  misc_feature (1139)..(1140): n is a, c, g, or t
  misc_feature (1142)..(1146): n is a, c, g, or t
  misc_feature (1148)..(1149): n is a, c, g, or t
  misc_feature (1152)..(1155): n is a, c, g, or t
  misc_feature (1157)..(1159): n is a, c, g, or t
  misc_feature (1161)..(1165): n is a, c, g, or t
  misc_feature (1167)..(1169): n is a, c, g, or t
  misc_feature (1172)..(1174): n is a, c, g, or t
  misc_feature (1177)..(1180): n is a, c, g, or t
  misc_feature (1182)..(1187): n is a, c, g, or t
  misc_feature (1189)..(1194): n is a, c, g, or t
  misc_feature (1196)..(1200): n is a, c, g, or t
  misc_feature (1203)..(1229): n is a, c, g, or t
  misc_feature (1231)..(1238): n is a, c, g, or t
  misc_feature (1240)..(1242): n is a, c, g, or t
  misc_feature (1244)..(1246): n is a, c, g, or t
  misc_feature (1248)..(1253): n is a, c, g, or t
  misc_feature (1255)..(1259): n is a, c, g, or t
  misc_feature (1261)..(1262): n is a, c, g, or t
  misc_feature (1265)..(1265): n is a, c, g, or t
  misc_feature (1267)..(1268): n is a, c, g, or t
  misc_feature (1270)..(1271): n is a, c, g, or t
  misc_feature (1273)..(1278): n is a, c, g, or t
  misc_feature (1280)..(1282): n is a, c, g, or t
  misc_feature (1284)..(1288): n is a, c, g, or t
  misc_feature (1290)..(1293): n is a, c, g, or t
  misc_feature (1295)..(1314): n is a, c, g, or t
  misc_feature (1316)..(1320): n is a, c, g, or t
  misc_feature (1323)..(1327): n is a, c, g, or t
  misc_feature (1330)..(1336): n is a, c, g, or t
  misc_feature (1338)..(1339): n is a, c, g, or t
  misc_feature (1341)..(1348): n is a, c, g, or t
  misc_feature (1351)..(1351): n is a, c, g, or t
  misc_feature (1354)..(1357): n is a, c, g, or t
  misc_feature (1360)..(1385): n is a, c, g, or t
  misc_feature (1387)..(1400): n is a, c, g, or t
  misc_feature (1402)..(1403): n is a, c, g, or t
  misc_feature (1405)..(1411): n is a, c, g, or t
  misc_feature (1413)..(1423): n is a, c, g, or t
  misc_feature (1426)..(1427): n is a, c, g, or t
  misc_feature (1429)..(1431): n is a, c, g, or t
  misc_feature (1433)..(1451): n is a, c, g, or t
  misc_feature (1453)..(1453): n is a, c, g, or t
  misc_feature (1456)..(1465): n is a, c, g, or t
  misc_feature (1467)..(1470): n is a, c, g, or t
  misc_feature (1473)..(1475): n is a, c, g, or t
  misc_feature (1478)..(1481): n is a, c, g, or t
  misc_feature (1483)..(1484): n is a, c, g, or t
  misc_feature (1486)..(1491): n is a, c, g, or t
  misc_feature (1493)..(1495): n is a, c, g, or t
  misc_feature (1497)..(1497): n is a, c, g, or t
  misc_feature (1499)..(1510): n is a, c, g, or t
  misc_feature (1512)..(1513): n is a, c, g, or t
  misc_feature (1516)..(1517): n is a, c, g, or t
  misc_feature (1520)..(1535): n is a, c, g, or t
  misc_feature (1537)..(1539): n is a, c, g, or t
  misc_feature (1542)..(1543): n is a, c, g, or t
  misc_feature (1548)..(1550): n is a, c, g, or t
  misc_feature (1552)..(1554): n is a, c, g, or t
  misc_feature (1556)..(1557): n is a, c, g, or t
  misc_feature (1561)..(1561): n is a, c, g, or t
  misc_feature (1567)..(1567): n is a, c, g, or t
  misc_feature (1569)..(1571): n is a, c, g, or t
  misc_feature (1573)..(1573): n is a, c, g, or t
  misc_feature (1577)..(1577): n is a, c, g, or t
  misc_feature (1579)..(1584): n is a, c, g, or t
  misc_feature (1586)..(1586): n is a, c, g, or t
  misc_feature (1590)..(1590): n is a, c, g, or t
  misc_feature (1593)..(1593): n is a, c, g, or t
  misc_feature (1595)..(1595): n is a, c, g, or t
  misc_feature (1597)..(1598): n is a, c, g, or t
  misc_feature (1600)..(1606): n is a, c, g, or t
  misc_feature (1608)..(1612): n is a, c, g, or t
  misc_feature (1614)..(1615): n is a, c, g, or t
  misc_feature (1617)..(1620): n is a, c, g, or t
  misc_feature (1622)..(1622): n is a, c, g, or t
  misc_feature (1626)..(1627): n is a, c, g, or t
  misc_feature (1630)..(1630): n is a, c, g, or t
  misc_feature (1634)..(1638): n is a, c, g, or t
  misc_feature (1640)..(1641): n is a, c, g, or t
  misc_feature (1643)..(1643): n is a, c, g, or t
  misc_feature (1647)..(1647): n is a, c, g, or t
  misc_feature (1650)..(1651): n is a, c, g, or t
  misc_feature (1653)..(1656): n is a, c, g, or t
  misc_feature (1658)..(1659): n is a, c, g, or t
  misc_feature (1662)..(1662): n is a, c, g, or t
  misc_feature (1667)..(1667): n is a, c, g, or t
  misc_feature (1670)..(1678): n is a, c, g, or t
  misc_feature (1681)..(1682): n is a, c, g, or t
  misc_feature (1686)..(1688): n is a, c, g, or t
  misc_feature (1691)..(1692): n is a, c, g, or t
  misc_feature (1696)..(1699): n is a, c, g, or t
  misc_feature (1702)..(1706): n is a, c, g, or t
  misc_feature (1711)..(1711): n is a, c, g, or t
  misc_feature (1716)..(1716): n is a, c, g, or t
  misc_feature (1721)..(1722): n is a, c, g, or t
  misc_feature (1725)..(1726): n is a, c, g, or t
  misc_feature (1728)..(1728): n is a, c, g, or t
  misc_feature (1730)..(1730): n is a, c, g, or t
  misc_feature (1735)..(1737): n is a, c, g, or t
  misc_feature (1740)..(1746): n is a, c, g, or t
  misc_feature (1749)..(1751): n is a, c, g, or t
  misc_feature (1755)..(1756): n is a, c, g, or t
  misc_feature (1760)..(1762): n is a, c, g, or t
  misc_feature (1765)..(1767): n is a, c, g, or t
  misc_feature (1770)..(1771): n is a, c, g, or t
  misc_feature (1773)..(1778): n is a, c, g, or t
  misc_feature (1827)..(1827): n is a, c, g, or t
  misc_feature (1831)..(1831): n is a, c, g, or t
  misc_feature (1874)..(1874): n is a, c, g, or t
  misc_feature (1884)..(1884): n is a, c, g, or t
  misc_feature (1887)..(1887): n is a, c, g, or t
  misc_feature (1939)..(1939): n is a, c, g, or t
  misc_feature (1944)..(1945): n is a, c, g, or t
  misc_feature (1950)..(1952): n is a, c, g, or t
  misc_feature (1954)..(1954): n is a, c, g, or t
  misc_feature (1962)..(1962): n is a, c, g, or t
  misc_feature (1974)..(1974): n is a, c, g, or t
  misc_feature (1985)..(1985): n is a, c, g, or t
  misc_feature (1988)..(1988): n is a, c, g, or t
  misc_feature (1997)..(1997): n is a, c, g, or t
  misc_feature (3979)..(3979): n is a, c, g, or t
ngcangcnnnannncnnnnnnnnnnnnnnnnnnagnnnnnnnnnnnngnnnnnnnnnnnnnnnnnccnnnnnnnnnnnnnnnnnnnnnncnnnnnnnnnnnnnnnnnnnngnnnnnnncnnncnnnnnnnnnnnnnnnncnnnnnnnnnnnnnnnnnnnnnnnnnannnnnnnnnnnnnnnnnnnnnnnnnnnannnnnnnnnnnncncnnnnnnnnnnnnnnnnnnnnnnnnnnnnnnnnnnnnnnnnnnnnnnnnnntnnnnnnnnnnnnnnnnnncnnnnncnnnatnnnnnnnnnnnnnnnncnnnnnnnnnnnncnnannnnnngnncnnnnnnannnnnnnnnnnnnnnnnnnnnnnnnnncnnnnnnncnnnnnnnnnnnnnnnanaangnnnannnnnnnnnnnnnnnnnnnnnnnnnngcnnannnnnnannnnnnnnnnnnncnnnnnnncnnnnnnnnnnnnnnnnnnnnnnnnnnnnnnnnnnnnnnnnnnnnnnnnnngnntnnnnnnnnnntnnnnnnannnnnnnnnnnnnnnnnnnnnannnnannnnnnnnnnnnncgannnnnannnnnannangnngangnngangncnnnnncgnnnncanngnnntngnnnngnnnangnnnntnnnnnnncngngnnnnnnnnnnnnnnnnnannnnnannnnnnnnnnntnnnnnnnnnncnnatncnnnnnnnnnnnnnncnnnnnncncnnncccnnnncnnnnnnnnnnnnnnnnannnnnannannnnnnnngngaangnnannnnnnnnagngnaanannannnnnannatnnnnnnnnncnnnnnannnnnnnnnnnnnnnnnnnncnannnnnnnnagnnnnannannannannannnnnnnnnnnnnnnnnnncnnnnnnngntnnnnnncnnnnncnnnnncncnnnnnnnnnnnnnnnnnanngnnannnnnnggnnnnnnannnnaannnnnnngacnnnntnnnnnnnnnnnannnnnnnnnnnnngnannnnnnnnnnnnnnncnagnnnannnncnnnagnannnnnannnnnnnncnnngnncntnnntnannnnnnnanannnnnnnannannnnnannnnnannnnnnannnnnnnnannannnnngnnacnnnnannnannnnnannnaannncannnncnnnnnntnnnnnnannnnnaannnnnnnnnnnnnnnnnnnnnnnnnnngnnnnnnnnannnannnannnnnnannnnnannatnannannannnnnntnnncnnnnncnnnnannnnnnnnnnnnnnnnnnnncnnnnncannnnnagnnnnnnngnngnnnnnnnnagnaannnngannnnnnnnnnnnnnnnnnnnnnnnnnannnnnnnnnnnnnnanngnnnnnnncnnnnnnnnnnngannannncnnnnnnnnnnnnnnnnnnnangannnnnnnnnngnnnnctnnngcnnnngnngnnnnnngnnntncnnnnnnnnnnnnannagnnatnnnnnnnnnnnnnnnntnnnggnnggagnnntnnngnngggngggggngnnnanaccncnnnnnncncccnccntngnncnnnnnnngnnnnnanngnnnntntttnnagngggnnnnnanntntttnccnngnnnngnnccnccttnggnnnnnnnnnaanngggnnnggnngagnnnnaannnnnaaggnggggnaaggnnaannananagggnnnaannnnnnnttnnnaaannggannnggnnnaannannnnnnccccaggaggcggagctatagtgtggggagaggaaagctatactggtcnctgngcattcctatataggaacgagcgtgaaccaatactgctccgangacgaaccantantggtccgacgacgaagctatatagcttcataccgctatgcagtagtgcttcngaggnnccacnnncntggtgatnccacagagaagnggagaaagggnttngggaaaagngaagaaggagactataccacgggatagtggtacagtctccttccttagggttggatagctaagtgcttaccagctggccttcttcaccccagggatgagaccggcagaagccatctcacggaactggatacgagagatgccgaactggcgcatatagcccttgggacgacccgtcatgctgcagcggttgtgcagacgtacgggagaagcgttcttaggcagagcctgaagtgcttcgtagttcccttcggccttgagctgagcacgcttggcagcatacttagcgacgagctttgcacgctttacttcgcgtgccttcattgattcctttgccatagtatttagttgcctttcttagcgttcttgaatgggaggccgaactccttgaggagtgcgtaaccttcttcgtcagtctgagccgaggtaacgaacgtgatgttcataccgaggatcttggtgatgccgtcgaggttgatctcagggaagatgatctgctcgctgataccgagggtatagttaccacggccatcgaacttgctttcgatccccttgaagtcacggatacggggcagcgcgatacggatcagacgctcgaggaactcgtacatctgctcgcggcgcagggtaaccataacaccgataggcatcttcttacgaagcttgaagttagagatgtccttcttcgaaaccgtagcaacagccttctgaccggtgatggcagagagttctgcgatagctacgtcgatgatcttcttatcagccgtagccataccgaggccctggttgatgacgatcttcttcaggacgggcacctgcatgcgagactgataaccgaactgctcgatgagggcgggaacgatgcgttccttatattcgttcttaagacttgcagtattgctcattacttaatctcctctcctgactttttggaataacgtacgagcttcccttcgtcgttgagacgacgaccgatacgcgtagccttacccgtcttaggatcgacgaggttgagcttagcgatatggataggagcttccttcttctcgatccctccctgagggttctttgcgctgggcttagcgtgcttagcgacgatggctacgccttcgacgatagcgcgctgcttgtctacgaggacttcaagcacacggcccgtcttccccttatctacaccgctgaggacgacgacctggtcgcccttcttgatatgtaacttactcatttcttctttcgtctttaagggttagaggacttcaggcgcgagagaaacgatcttcatattcacggcacgcagctcacgagctacagggccgaagatacggctaccacgcatatcgccagcagcattgagcaggacgcaagcgttgtcatcgaagcggatgtaggagccgtcgggacgacgaacttccttcttcgtgcggacgatgattgccttagatacgacacccttcttcaggtcagaagaggggatgacgctcttgacagcaacgacgatgatatcaccgacagaggcatagcgacggcgcgtaccgccgaggacgcggatacagagggcttcctttgcaccgctattgtctgctactacgagtcttgattcttgctggatcatatactacttagctctttcgataatattgactaatctccatctcttggtacggctcaaagggcgagtctccatgatacggaccgtatcaccgatgttgcactcgttcttctcgtcgtgagcatggtacttcttcgtcttgttgacgaacttaccatagatagggtgcttttccttccacttgacagcgaccgtaatggtcttgtccatcttattggaagaaacgacgcctacacgttcttttcttaatcttctctgttccatcgggaggacacattaattgttgttgagttcgcgctcacgaaggatggtcttcatctgagcgatcgtgcggcgcatgcggcggatctcagcagggttgtctgcgggggtcacngcatggtcgatgcacttcttg

SEQ ID NO: 1636 - DNA, 4000 bp, Escherichia coli
  misc_feature (1)..(1): n is a, c, g, or t
  misc_feature (3)..(4): n is a, c, g, or t
  misc_feature (6)..(7): n is a, c, g, or t
  misc_feature (10)..(10): n is a, c, g, or t
  misc_feature (12)..(12): n is a, c, g, or t
  misc_feature (14)..(16): n is a, c, g, or t
  misc_feature (20)..(21): n is a, c, g, or t
  misc_feature (25)..(27): n is a, c, g, or t
  misc_feature (30)..(30): n is a, c, g, or t
  misc_feature (32)..(32): n is a, c, g, or t
  misc_feature (34)..(34): n is a, c, g, or t
  misc_feature (36)..(37): n is a, c, g, or t
  misc_feature (39)..(40): n is a, c, g, or t
  misc_feature (42)..(44): n is a, c, g, or t
  misc_feature (47)..(47): n is a, c, g, or t
  misc_feature (50)..(52): n is a, c, g, or t
  misc_feature (54)..(56): n is a, c, g, or t
  misc_feature (58)..(58): n is a, c, g, or t
  misc_feature (60)..(61): n is a, c, g, or t
  misc_feature (63)..(63): n is a, c, g, or t
  misc_feature (65)..(65): n is a, c, g, or t
  misc_feature (71)..(71): n is a, c, g, or t
  misc_feature (73)..(73): n is a, c, g, or t
  misc_feature (75)..(75): n is a, c, g, or t
  misc_feature (77)..(82): n is a, c, g, or t
  misc_feature (84)..(84): n is a, c, g, or t
  misc_feature (87)..(89): n is a, c, g, or t
  misc_feature (92)..(92): n is a, c, g, or t
  misc_feature (94)..(95): n is a, c, g, or t
  misc_feature (97)..(97): n is a, c, g, or t
  misc_feature (99)..(102): n is a, c, g, or t
  misc_feature (105)..(105): n is a, c, g, or t
  misc_feature (108)..(108): n is a, c, g, or t
  misc_feature (110)..(110): n is a, c, g, or t
  misc_feature (112)..(116): n is a, c, g, or t
  misc_feature (118)..(118): n is a, c, g, or t
  misc_feature (122)..(122): n is a, c, g, or t
  misc_feature (125)..(126): n is a, c, g, or t
  misc_feature (128)..(129): n is a, c, g, or t
  misc_feature (132)..(132): n is a, c, g, or t
  misc_feature (134)..(134): n is a, c, g, or t
  misc_feature (138)..(139): n is a, c, g, or t
  misc_feature (141)..(142): n is a, c, g, or t
  misc_feature (144)..(145): n is a, c, g, or t
  misc_feature (148)..(148): n is a, c, g, or t
  misc_feature (150)..(150): n is a, c, g, or t
  misc_feature (152)..(152): n is a, c, g, or t
  misc_feature (160)..(161): n is a, c, g, or t
  misc_feature (163)..(165): n is a, c, g, or t
  misc_feature (168)..(168): n is a, c, g, or t
  misc_feature (170)..(170): n is a, c, g, or t
  misc_feature (173)..(174): n is a, c, g, or t
  misc_feature (177)..(178): n is a, c, g, or t
  misc_feature (183)..(183): n is a, c, g, or t
  misc_feature (185)..(186): n is a, c, g, or t
  misc_feature (188)..(188): n is a, c, g, or t
  misc_feature (190)..(190): n is a, c, g, or t
  misc_feature (192)..(192): n is a, c, g, or t
  misc_feature (194)..(199): n is a, c, g, or t
  misc_feature (202)..(204): n is a, c, g, or t
  misc_feature (206)..(206): n is a, c, g, or t
  misc_feature (208)..(208): n is a, c, g, or t
  misc_feature (210)..(210): n is a, c, g, or t
  misc_feature (212)..(212): n is a, c, g, or t
  misc_feature (214)..(215): n is a, c, g, or t
  misc_feature (217)..(218): n is a, c, g, or t
  misc_feature (220)..(220): n is a, c, g, or t
  misc_feature (223)..(228): n is a, c, g, or t
  misc_feature (230)..(230): n is a, c, g, or t
  misc_feature (232)..(233): n is a, c, g, or t
  misc_feature (235)..(238): n is a, c, g, or t
  misc_feature (241)..(241): n is a, c, g, or t
  misc_feature (243)..(243): n is a, c, g, or t
  misc_feature (245)..(248): n is a, c, g, or t
  misc_feature (251)..(252): n is a, c, g, or t
  misc_feature (256)..(257): n is a, c, g, or t
  misc_feature (260)..(260): n is a, c, g, or t
  misc_feature (262)..(264): n is a, c, g, or t
  misc_feature (267)..(267): n is a, c, g, or t
  misc_feature (269)..(269): n is a, c, g, or t
  misc_feature (271)..(272): n is a, c, g, or t
  misc_feature (274)..(274): n is a, c, g, or t
  misc_feature (276)..(276): n is a, c, g, or t
  misc_feature (278)..(278): n is a, c, g, or t
  misc_feature (280)..(282): n is a, c, g, or t
  misc_feature (284)..(284): n is a, c, g, or t
  misc_feature (287)..(288): n is a, c, g, or t
  misc_feature (290)..(290): n is a, c, g, or t
  misc_feature (293)..(293): n is a, c, g, or t
  misc_feature (296)..(297): n is a, c, g, or t
  misc_feature (299)..(301): n is a, c, g, or t
  misc_feature (303)..(303): n is a, c, g, or t
  misc_feature (305)..(311): n is a, c, g, or t
  misc_feature (313)..(314): n is a, c, g, or t
  misc_feature (316)..(319): n is a, c, g, or t
  misc_feature (321)..(326): n is a, c, g, or t
  misc_feature (329)..(330): n is a, c, g, or t
  misc_feature (333)..(334): n is a, c, g, or t
  misc_feature (336)..(337): n is a, c, g, or t
  misc_feature (339)..(339): n is a, c, g, or t
  misc_feature (343)..(345): n is a, c, g, or t
  misc_feature (347)..(348): n is a, c, g, or t
  misc_feature (352)..(354): n is a, c, g, or t
  misc_feature (356)..(357): n is a, c, g, or t
  misc_feature (360)..(361): n is a, c, g, or t
  misc_feature (363)..(363): n is a, c, g, or t
  misc_feature (365)..(365): n is a, c, g, or t
  misc_feature (368)..(368): n is a, c, g, or t
  misc_feature (370)..(371): n is a, c, g, or t
  misc_feature (374)..(375): n is a, c, g, or t
  misc_feature (377)..(377): n is a, c, g, or t
  misc_feature (379)..(381): n is a, c, g, or t
  misc_feature (384)..(387): n is a, c, g, or t
  misc_feature (389)..(390): n is a, c, g, or t
  misc_feature (392)..(392): n is a, c, g, or t
  misc_feature (395)..(395): n is a, c, g, or t
  misc_feature (398)..(401): n is a, c, g, or t
  misc_feature (404)..(405): n is a, c, g, or t
  misc_feature (409)..(410): n is a, c, g, or t
  misc_feature (412)..(412): n is a, c, g, or t
  misc_feature (414)..(414): n is a, c, g, or t
  misc_feature (416)..(416): n is a, c, g, or t
  misc_feature (418)..(419): n is a, c, g, or t
  misc_feature (421)..(423): n is a, c, g, or t
  misc_feature (425)..(425): n is a, c, g, or t
  misc_feature (427)..(429): n is a, c, g, or t
  misc_feature (431)..(434): n is a, c, g, or t
  misc_feature (436)..(436): n is a, c, g, or t
  misc_feature (439)..(439): n is a, c, g, or t
  misc_feature (443)..(443): n is a, c, g, or t
  misc_feature (446)..(446): n is a, c, g, or t
  misc_feature (450)..(450): n is a, c, g, or t
  misc_feature (453)..(456): n is a, c, g, or t
  misc_feature (458)..(458): n is a, c, g, or t
  misc_feature (460)..(460): n is a, c, g, or t
  misc_feature (462)..(462): n is a, c, g, or t
  misc_feature (466)..(466): n is a, c, g, or t
  misc_feature (468)..(470): n is a, c, g, or t
  misc_feature (475)..(475): n is a, c, g, or t
  misc_feature (477)..(478): n is a, c, g, or t
  misc_feature (480)..(480): n is a, c, g, or t
  misc_feature (482)..(483): n is a, c, g, or t
  misc_feature (487)..(487): n is a, c, g, or t
  misc_feature (489)..(489): n is a, c, g, or t
  misc_feature (492)..(493): n is a, c, g, or t
  misc_feature (495)..(498): n is a, c, g, or t
  misc_feature (500)..(501): n is a, c, g, or t
  misc_feature (504)..(506): n is a, c, g, or t
  misc_feature (508)..(510): n is a, c, g, or t
  misc_feature (513)..(515): n is a, c, g, or t
  misc_feature (518)..(521): n is a, c, g, or t
  misc_feature (523)..(524): n is a, c, g, or t
  misc_feature (526)..(526): n is a, c, g, or t
  misc_feature (528)..(533): n is a, c, g, or t
  misc_feature (535)..(539): n is a, c, g, or t
  misc_feature (542)..(542): n is a, c, g, or t
  misc_feature (545)..(545): n is a, c, g, or t
  misc_feature (547)..(548): n is a, c, g, or t
  misc_feature (550)..(551): n is a, c, g, or t
  misc_feature (553)..(561): n is a, c, g, or t
  misc_feature (564)..(564): n is a, c, g, or t
  misc_feature (567)..(567): n is a, c, g, or t
  misc_feature (570)..(570): n is a, c, g, or t
  misc_feature (572)..(577): n is a, c, g, or t
  misc_feature (580)..(580): n is a, c, g, or t
  misc_feature (583)..(587): n is a, c, g, or t
  misc_feature (589)..(589): n is a, c, g, or t
  misc_feature (593)..(595): n is a, c, g, or t
  misc_feature (597)..(604): n is a, c, g, or t
  misc_feature (606)..(606): n is a, c, g, or t
  misc_feature (609)..(609): n is a, c, g, or t
  misc_feature (612)..(615): n is a, c, g, or t
  misc_feature (618)..(618): n is a, c, g, or t
  misc_feature (621)..(621): n is a, c, g, or t
  misc_feature (625)..(627): n is a, c, g, or t
  misc_feature (629)..(637): n is a, c, g, or t
  misc_feature (639)..(639): n is a, c, g, or t
  misc_feature (642)..(645): n is a, c, g, or t
  misc_feature (647)..(649): n is a, c, g, or t
  misc_feature (651)..(654): n is a, c, g, or t
  misc_feature (657)..(657): n is a, c, g, or t
  misc_feature (659)..(659): n is a, c, g, or t
  misc_feature (662)..(669): n is a, c, g, or t
  misc_feature (671)..(671): n is a, c, g, or t
  misc_feature (673)..(673): n is a, c, g, or t
  misc_feature (676)..(676): n is a, c, g, or t
  misc_feature (678)..(678): n is a, c, g, or t
  misc_feature (680)..(680): n is a, c, g, or t
  misc_feature (683)..(683): n is a, c, g, or t
  misc_feature (685)..(686): n is a, c, g, or t
  misc_feature (688)..(688): n is a, c, g, or t
  misc_feature (690)..(691): n is a, c, g, or t
  misc_feature (693)..(700): n is a, c, g, or t
  misc_feature (702)..(702): n is a, c, g, or t
  misc_feature (706)..(708): n is a, c, g, or t
  misc_feature (710)..(710): n is a, c, g, or t
  misc_feature (712)..(714): n is a, c, g, or t
  misc_feature (716)..(716): n is a, c, g, or t
  misc_feature (719)..(723): n is a, c, g, or t
  misc_feature (725)..(725): n is a, c, g, or t
  misc_feature (727)..(727): n is a, c, g, or t
  misc_feature (729)..(731): n is a, c, g, or t
  misc_feature (735)..(735): n is a, c, g, or t
  misc_feature (740)..(740): n is a, c, g, or t
  misc_feature (742)..(744): n is a, c, g, or t
  misc_feature (746)..(746): n is a, c, g, or t
  misc_feature (749)..(749): n is a, c, g, or t
  misc_feature (751)..(751): n is a, c, g, or t
  misc_feature (753)..(755): n is a, c, g, or t
  misc_feature (757)..(759): n is a, c, g, or t
  misc_feature (761)..(761): n is a, c, g, or t
  misc_feature (763)..(763): n is a, c, g, or t
  misc_feature (765)..(765): n is a, c, g, or t
  misc_feature (768)..(773): n is a, c, g, or t
  misc_feature (775)..(776): n is a, c, g, or t
  misc_feature (778)..(781): n is a, c, g, or t
  misc_feature (783)..(783): n is a, c, g, or t
  misc_feature (785)..(788): n is a, c, g, or t
  misc_feature (790)..(793): n is a, c, g, or t
  misc_feature (795)..(796): n is a, c, g, or t
  misc_feature (800)..(800): n is a, c, g, or t
  misc_feature (802)..(803): n is a, c, g, or t
  misc_feature (805)..(806): n is a, c, g, or t
  misc_feature (809)..(809): n is a, c, g, or t
  misc_feature (811)..(812): n is a, c, g, or t
  misc_feature (814)..(815): n is a, c, g, or t
  misc_feature (817)..(817): n is a, c, g, or t
  misc_feature (819)..(820): n is a, c, g, or t
  misc_feature (823)..(825): n is a, c, g, or t
  misc_feature (827)..(827): n is a, c, g, or t
  misc_feature (829)..(829): n is a, c, g, or t
  misc_feature (831)..(834): n is a, c, g, or t
  misc_feature (836)..(836): n is a, c, g, or t
  misc_feature (839)..(841): n is a, c, g, or t
  misc_feature (843)..(844): n is a, c, g, or t
  misc_feature (846)..(846): n is a, c, g, or t
  misc_feature (849)..(851): n is a, c, g, or t
  misc_feature (853)..(853): n is a, c, g, or t
  misc_feature (855)..(856): n is a, c, g, or t
  misc_feature (859)..(859): n is a, c, g, or t
  misc_feature (861)..(861): n is a, c, g, or t
  misc_feature (863)..(864): n is a, c, g, or t
  misc_feature (866)..(866): n is a, c, g, or t
  misc_feature (869)..(870): n is a, c, g, or t
  misc_feature (872)..(873): n is a, c, g, or t
  misc_feature (875)..(876): n is a, c, g, or t
  misc_feature (881)..(883): n is a, c, g, or t
  misc_feature (886)..(887): n is a, c, g, or t
  misc_feature (890)..(890): n is a, c, g, or t
  misc_feature (892)..(892): n is a, c, g, or t
  misc_feature (894)..(896): n is a, c, g, or t
  misc_feature (899)..(901): n is a, c, g, or t
  misc_feature (904)..(904): n is a, c, g, or t
  misc_feature (906)..(906): n is a, c, g, or t
  misc_feature (908)..(916): n is a, c, g, or t
  misc_feature (918)..(918): n is a, c, g, or t
  misc_feature (920)..(920): n is a, c, g, or t
  misc_feature (925)..(925): n is a, c, g, or t
  misc_feature (927)..(929): n is a, c, g, or t
  misc_feature (932)..(932): n is a, c, g, or t
  misc_feature (934)..(936): n is a, c, g, or t
  misc_feature (941)..(941): n is a, c, g, or t
  misc_feature (943)..(947): n is a, c, g, or t
  misc_feature (949)..(949): n is a, c, g, or t
  misc_feature (951)..(951): n is a, c, g, or t
  misc_feature (953)..(953): n is a, c, g, or t
  misc_feature (956)..(956): n is a, c, g, or t
  misc_feature (958)..(962): n is a, c, g, or t
  misc_feature (964)..(965): n is a, c, g, or t
  misc_feature (967)..(967): n is a, c, g, or t
  misc_feature (969)..(969): n is a, c, g, or t
  misc_feature (971)..(973): n is a, c, g, or t
  misc_feature (975)..(975): n is a, c, g, or t
  misc_feature (980)..(981): n is a, c, g, or t
  misc_feature (988)..(988): n is a, c, g, or t
  misc_feature (1361)..(1361): n is a, c, g, or t
  misc_feature (1418)..(1418): n is a, c, g, or t
  misc_feature (1430)..(1430): n is a, c, g, or t
  misc_feature (1667)..(1667): n is a, c, g, or t
  misc_feature (1736)..(1736): n is a, c, g, or t
  misc_feature (1976)..(1976): n is a, c, g, or t
  misc_feature (1985)..(1985): n is a, c, g, or t
  misc_feature (1988)..(1988): n is a, c, g, or t
  misc_feature (2003)..(2003): n is a, c, g, or t
  misc_feature (2012)..(2012): n is a, c, g, or t
  misc_feature (2378)..(2378): n is a, c, g, or t
  misc_feature (3355)..(3355): n is a, c, g, or t
  misc_feature (3686)..(3686): n is a, c, g, or t
nanncnnttntncnnntttnncccnnnttncncntnngnnannnccnaannngnnntncnngngngggganananannnnnngnggnnnaananntncnnnnccnaangncnnnnntnggcnccnngnnccncnagcnnanngnnttntncnctctctcnnannnccncntgnnccnntttgngnnanantngnnnnnntannngngngngngnnanngnaannnnnncngnntnnnnaananannnnttnncccnnaantnnngcncntnnanantntnnncnctnngnttnttnncnnnancnnnnnnnanngnnnntnnnnnnggnnaanngnntncgcnnngnntttnnngnnccnnangnccncnnatnncngnnntcnnnntnncnaanaannnnatnnccgnncncncncnntnnntntnnncnnnnanttnttgngcnctcnccnnnncncnanccanannnctttncnntncnnggcncnggnnannnntnnccnnntnnnttnnnttnnnntnnanannnnnnannnnnccnggntnngnntnnnnnnnnnttnccncangnnnnnnaanttnnnnntntttnnncnnnnnnnncnaanttnnnnggnttnggtnnnannnnnnnnnanccnnnntnnnannnnttncnccnnnnnnnncncnaangngnggncnntnanngnnnnnnnngnaatnnngngnnncnccnnnnngncntnnnggangcgtntnnntnccnancnnncnnncncngnaannnnnntnncnnnnanannnntnnnngnntttncnnanngcncnngnnantnnccnnncncncnnnngngcnnngnnanaannntntnnccntncnntnggnncnntnnggagnnnatnnccntntnnnttnnnttntntnnnnnnnnnananttttngnnnttntnnntttcncnnnnntntnanaantnnnnngnncngncnnncnaattnncccccanccataaaaggatgtgatgggcgccatgatcttaactatggcttctgattggcgcccctttcgagcgacctctctccttttttggagaagcatcgcggcgaggggaggcgggaaatgcctcgccatctgtgaacagggaagagcgagcaacccggtgcttttcgatgagaaccgcaagacggtcacggtcaacaggcttgatcatataattggacgcgcccagttcaaatcccatggattcattgtctacgaccgttaccataatcaccgggatctctgccaattcaggatccgctttcaactgattcagaacggcccaaccatcacagtccggcataatgacatccagcgttacaacgagtggcttcacttgnttggccagacgcaaaccttcttcgccactcgcggcggcgaccacgtgaaaccctagnctcgtcagaaancgggacatcaggtcgcggaccgtggagtcatcatcgatcaccaggatggtatccaggttcgatttcgtctccagggagatggccggaggatcgttggtcttctctgtctgcgtgccttcggctatctctgtcgtgactttggctggaagatatacggtaaagacggaaccctgacccggctcactctcgacggaaattcggcccttcatcaatcggacgtaccggtaactgatggcnagtcccaagcctgtccctccgtacttcctggctatggagacatccgcctgggtaaactcttgaaatagntttgtcttctgtttcggagtgatcccaatgcccgtgtcggtgacacggaaccggatccagtcttgaccttcgtccatgctcctatccacacccactgagattgtgccgtgctccgtgaatttgcacgcgttgctaagcaagttgaataagatctggcggaccttcgtgatatcggctcgcattactcccagttcctctgccacgtggacctggatagcattggagttcttcgatatcgcnggatgaagngtngtaaccatttcgttnatcatctgngatatatcgaaggtttcaagatgcagccccatcctcccggcctcaatctttgataagtccagcacatcattgatcagggacaataagtgtttccccgctccctgaatcttttgcaaatccttgacgttctctaacttgcccaattcgtgtgtttcttcctccagcatttcgctataaccaatgatcgcgttgagcggagtgcgcaattcgtggctcatattggcgaggaatgcgcttttggcgcggttcgcatcctcggctgcgtgctttgcattgagcaactcctgctgcatctccttgcggtggactatttcgccttccaactccatggtcctggtcttaagctcatcgttggcgtggtgcaangccgtatcccgatgctgaatttcggacaacatcgtattgaacccgtcgatcagccttccgatttcgtcgccgtaaaatttggtggctcgaacttcgtagctttttgtggcggaaaccattctcatcgtgtcttctaggtgcaaaatgggcccggaaatcaatttctggagcttcgaagacacgaggagtgcaaagaagccggagatcagcacgaaactcaagaagatgcttgcatatcgtttggcccgcaaattccattggcgcatgtccgactgcagaaatagagttccgaggggttccccttttagagcgacgtcgcgaaagacttccagataacttgcttgaaaacgataacctctttcctgcggaggggcaggaagaggtggcgggggggcgttcgcgtgagaatagttggcgaagatttttccgtcgcgtgtatataacacagccgatacgatgtcttgcttggcctggagggccgacaacgttacggtcgcggaggcttcgtctttaaaagccatcgccgccgcgctgttatacccaataatatcggcctgcgtcatcagatcctggctcaatgaattgcgaaatgaaattaggtcgtaaatgagaaagcctgcggaagacagaaccacggcgacgccactcgtcagcatcgtgatcagcatcagttttcgcttgatggagagatctttcagattcattcgggcttcctcccatcagccgcggcctgttggacgattctagccagtgtcagcagcctggaactgatggtcaggtctgcgtgcttggctgcctcgacgttcacctcaaaacgaaccttattgtcctccaacatgaaattaatgatgccaccgcgcttggcgaaacccggcgcgtccccgattgtcaaaattggcagacctttcatcgcgtcaatcacactctcgatgtgttctttttccgacgaacttacaaacaagatgttgcagtccctnagatctttgaaatcccggctccatttcaccctcttgaccgcaaagccccgtccgttgattttcttgtcagcgacgatcctgtcgagggtcgccccaaagggatcctcccctagaatacctatcacaatcggggaatccggctgggcaaaagaggccgtgggccattccactaattttgcgaaattgtaaataaagccagccttgatcaaatattccgaggaatcggaagagtccaatgcttctgcatggcctcccaaggccatggcggacaacagacaggttatgccgatcagcaacccaacttttttcatgaaccctttgcctgcctatncattaagtccggctcctgagagcccactcgccacactactcaaatctccaggtaatggttccccggaaggtgcgcgccacccgggtgggtattgtgttgataaattccggaataaactccacgtgccgcttattcagcaagttttgcccgccaacggagagctccaggtgtgcaattggcttccagccgagttgagcatccaaagagtagtagctgggtatattgagacttgaaagccgatccacgtatcgaacagttaagtcctgctccaaatgcataggcaagtctaacgaggacctcacataccattgatg

SEQ ID NO: 1637 - DNA, 4000 bp, Escherichia coli
  misc_feature (51)..(51): n is a, c, g, or t
  misc_feature (153)..(153): n is a, c, g, or t
  misc_feature (162)..(162): n is a, c, g, or t
  misc_feature (606)..(606): n is a, c, g, or t
  misc_feature (616)..(616): n is a, c, g, or t
  misc_feature (648)..(648): n is a, c, g, or t
  misc_feature (789)..(789): n is a, c, g, or t
  misc_feature (791)..(791): n is a, c, g, or t
  misc_feature (930)..(930): n is a, c, g, or t
  misc_feature (942)..(942): n is a, c, g, or t
  misc_feature (984)..(985): n is a, c, g, or t
  misc_feature (987)..(987): n is a, c, g, or t
  misc_feature (1122)..(1122): n is a, c, g, or t
  misc_feature (1185)..(1185): n is a, c, g, or t
  misc_feature (1272)..(1272): n is a, c, g, or t
  misc_feature (1467)..(1467): n is a, c, g, or t
  misc_feature (1473)..(1473): n is a, c, g, or t
  misc_feature (1557)..(1557): n is a, c, g, or t
  misc_feature (1995)..(1995): n is a, c, g, or t
  misc_feature (2045)..(2045): n is a, c, g, or t
  misc_feature (2049)..(2049): n is a, c, g, or t
  misc_feature (2078)..(2079): n is a, c, g, or t
  misc_feature (2279)..(2279): n is a, c, g, or t
  misc_feature (2392)..(2392): n is a, c, g, or t
  misc_feature (2663)..(2663): n is a, c, g, or t
  misc_feature (2851)..(2851): n is a, c, g, or t
  misc_feature (3289)..(3289): n is a, c, g, or t
  misc_feature (3334)..(3334): n is a, c, g, or t
  misc_feature (3561)..(3561): n is a, c, g, or t
  misc_feature (3610)..(3610): n is a, c, g, or t
  misc_feature (3613)..(3613): n is a, c, g, or t
  misc_feature (3622)..(3622): n is a, c, g, or t
  misc_feature (3658)..(3658): n is a, c, g, or t
  misc_feature (3772)..(3772): n is a, c, g, or t
ggagtgaaggtgaaaacacgagtaaaatattggtctaacgagaacgaagangtaaacttcaagcctttaaggatttgatagttcaaacctaagctcaatctcacgttatagttagagttggttttatcgatatcacgcaactgcttaagggcntctttttcngcaatacttcctttaccagggagcacagttggggttcgtttagggtcgaaagtaagaccttgaacacgtcccatatccgagccagccttttgagttgtgtaggttaagttaattcttgagtataagcttaactttgtagataggttgaaatccaagttggttaacaagctatatctgcggaagttagagctaatcatgatacctgtttcgtcgtaaataccaccatttacaagatagcgcacattttctgtaccgcccgaaagctgtacatcagccttagtaacacgtccaactctgaaggcatatttccaccagttggttctattattatagaaggtgttcaacgagtcttgtgcaattgaaggcaaacgacggtcgccttccaccacattaccatttctccaaaggtagtcgtaagcaccatctccgtcgatatcccagccntatgagtctntataagacttgggatgaacaaggttatcggtnatataatcatagtgagaagtgcgttgttgctttgccattagcaatgcaatgtctctttctcctttacctaagatttgcactggagtacttggtagccacgaaagcgattgcgaaacgttgatattcacttccgacttaccngncttaccctttttagttgtaaccaagatcacaccatttcctgctctcgaaccatacaaagaagccgaagcagcatctttcaacacttgcacactctcgatacttgaggggtctaagcccgacaatgggttgatacctccngtgctttcagangatccactcgttacaggtacaccgtcgataacgaacaatggnntnccatcgttcacgcctttttggttcaatgagctaaaaccacgaatcgtaatcttcgatcctctaccaccaggagagcccgaaaggttggtaacatccacaccagctacacggccttgaagaaggttttcgacactnggtgaaggtgttttttgtaggtcttcggctttaactgaaccgatagcacccacttgttcacgngtatttcgtttaccataagcaataaccgacacctcgcccaccatgtaagcagatgaaggaagggtgatggttaatggtttattggcntcgtatttaatggtttttgtttcgtaaccaacgctcgacacagttacatcgccatgctctttgtctacaagaagagtgaagttaccatccatgtcggcacttgttcctaccgaggtgccttttatttgcaccgttgcaagtggaataccgcctccatctttgtcttttaccaagcctttaagggtgaatttgccngctgcnttcttttgcattttgaacacattgatagcctttccctctacgttgtaggtaaagggtgtgccctttaaaacgctttgaatggcnctcaactcatctacgttatcgaatgatatcgtaagagttagcgagtcgtttttcacatcatcggtgtaattcaccttgtactcgcccttgctagataagaaatctaggatgtaagcaacgctcttttctttaaaagaaatagagaaatttttgtttaatacttgtgctcccgcattcaaaggattagaaaaggataggagaacagcattaaataaaaacaagaaaaatagattccttgttttgtttgatgcactctttcttgtcattaatgattactttttggttacgaagtctcggtttatcttgtggtatcactacggaaagaaaaactcaaagaaattctttaatattaaaaattttcgattgcaaaaatacgaaaaaactacaacaccttattatttttagtgagagattatcaaaaaaaatagccttctaacntctattttacacattcttaatactaaaaaagataagttcttgattattgncccnttttatttataatttaacaacctttcaanntgcccccaatagcagtgcttttttgcttcaatttcattgctttttcagtgtaaaagaagtgcttttgcgccccaaagtcaatgcttttctggcacgagcagataacactctcaccacaagtgctttactcattcgtggccttgctaaaggttatcgctcttttctgttgtgtagcaaataaaaaataactaactttgtanaattaaaccacgtcttaactatggaacaactgctacactacatttggaaacacaagctattttcgctctcgcaactcgttacgactgagggcaaaaacgttgaaataatcgancaaggacggcacaacaccgacgctggacccgactttttcaatgctaaaatacgaatagctggaaccgaatgggtgggcaatgtagagattcattgtaaggcatcggaatggtttttgcatcaccacgacaccgacgaacgctacgacaacgttattcttcatgtgtgtggtgagatagacgacattgcaacaacgagcaaagggcgacaaattgagcagacaattctgcccattcctgcccccatcgaggcgtgttatcaagagctaatgncgcctcacaactcgcctgctccatgctatctgcatgctgccaacatgcctaaaattaagcaaagagcgtggctcagcgcattgcaaacagagcggttagaacgcaaaacgaaggcgatctttgagcgactcgacaagtgtaacaagtcgtgggagcaggttttcttcgtaacactcgcccgaaatttnggctttggcatcaacaataacgcctttgaagagtgggctttcaatgtgcctttgcacgtaattgaccatcatagagacgatttgttgcaggtagaagctttgttcttggggcttgcaggcttgttagacgagggtcagatgaatgacgaacagcgtcaaagagtggcgaacgacgcctattttgcaaggctcaaacaagagtataactatctttcgcacaagttttctctctcgtgtatgagggcttcgcactggaaattcttgcgtcttcgacctcaaaatttccctcatctgcgcatcgctcagttggcaagtttgtatcatctgcgccaaattgggttgagatcgatgctcgaaagcaaggacattgcctctattcaaaagcttttttgctttgaaacgagcagttattggcaacaccactacacgttcggaacnccctcgcaaaaggggtctaagcagctttctaaaggctcgataganctcattatcatcaacaccatcgtgcctttgctgtttgcttatggcaaatatagcaacaaagcggaattgtgcaacactgcactcgacttgtgggaacagctcgaacccgaacaaaaccacatcgttacgcaatggaaaaagagtggtttttgcatcgaatcggctgccgacacgcaggcacttattcagcttcacaacgaatattgcgccacgaaagattgcttganatgtcgctttggcttcgactttctgcgctcttgcacggcaaccaacaanaantgagatatnaatttaaataagataaaaatggaatatgtatttacnatgaagatgagcgttcgtgactatgaatgcgacttgcagggtattgtgaacaacgctaactatcttcactacatagaacatacacgacacgagttcttaaagcatgcaggggcnaactttgcagagcttcatcaaaacggaatagatgcggttgtggctcgcatgaacctacaatataaaacgccattgcgcagcgacgacaccttcgaatcgtgcctcaacctcactaaagagggtattcgttacactttttatcaagacatctacaatgccactacccgccaattgtgctttagagccagtgttgatgtggcgtgcattgtgaacaaccgacttggaagg

SEQ ID NO: 1638 - DNA, 4000 bp, Escherichia coli
  misc_feature (1877)..(1877): n is a, c, g, or t
  misc_feature (1986)..(1986): n is a, c, g, or t
  misc_feature (1990)..(1990): n is a, c, g, or t
  misc_feature (2003)..(2003): n is a, c, g, or t
  misc_feature (2021)..(2021): n is a, c, g, or t
  misc_feature (2024)..(2024): n is a, c, g, or t
  misc_feature (2027)..(2027): n is a, c, g, or t
  misc_feature (2030)..(2030): n is a, c, g, or t
  misc_feature (2033)..(2033): n is a, c, g, or t
  misc_feature (2036)..(2036): n is a, c, g, or t
  misc_feature (2051)..(2051): n is a, c, g, or t
  misc_feature (2054)..(2054): n is a, c, g, or t
  misc_feature (2712)..(2712): n is a, c, g, or t
  misc_feature (3043)..(3043): n is a, c, g, or t
  misc_feature (3399)..(3399): n is a, c, g, or t
cgtcgccgcagtcctcgaggtagtctgtgtgctctgtagcagcacccagtggtacggtgtccttcgtggcttcgtcgcttcgtcgtttctttgtggcgcgctctgtagcattgccgtctgcatcggattcggtgtttgtggcgcgctctgtagcattgccgtctgccttggactcgtctgcatcggattcggtagcattgctgcttgcttcggagtctgtgtcttcaggtggcggctgtgggatcaggaatgtgtgcatggctgtcgcttccgtgcgtccagtggcccgactggcgcacaagagtccttggtcgctcgtgctgtggttcaacatacgcttgcactcgtgcatcatggcgatgcccttgccagaaaaaactttgaggttgtgttctgtcttcacacagctcgctcctgtcgccagaaacacgccgagctcgcaagcggagaaccacatcgtgcggttggcacagaatatgaaccgacgtatccttagcctggctcgttggatcagagtggtctctgctgcatctggctcattctccgcggcgacgatgcggcgcatacatgcagcgaacggttgcatgacggggccgagagcctcttgtgccttggatgcatatttggtcatgtagaaatctgcgacgtgggctgctcgcatcgctgtcgcaagtgtgttcatgatgagtctgcctgtggcgccaatgcgtctgccgatgccgcacaataatggcatagtgggtctggaggtgccggtgtgcgacggagaatcctgctctgtagcatggacgtctggcactgatctcttctggtattgcttgtcggcgttgcagcggagggtggcctgtagcacgtcgtctgacgatgatctgaacggcgaatcccgtggtaccattgacttaccatactcgttttcatcgttgcctgtggcaatgaacgctttcttaacgatttccttgccgcgtcttatgacatacttgatgaatccagcaatgctgagggcaacgtggcggtagaatctgaagcgacacttgggcacgccagggccggagagtttttggccgcttcgctggggtggccctgcagcactttcctttttcttcttctcgtatttgacacatgtgccggtgcagtcgtgatcgtggttctgaatgaagcatgctctctgatctctcgcaaagcttgtgctccatgctctacaatcgtcgtggatttgttcaggtgttgcctcctcgccatctggtgtacgaaaacctgtcacctcaccgctcgagtcgacgacatattctttaccatgtggaagccatccgctgttgtctgtgcgctctgtagcaacactcgggtagtagccatactcgtcgggtacctcaacatggccgaagctgtcggagcgccggtacatgggcatcatgctctgggtggcaccggtgagtgggagctccttgtaggggttccgcattggccgctgctgtgtgatcgaatttgcttcttcggtcctgatgtggccattgggctcccgctcagttactgcaatgaatggacggagcggcgcattgtcgtccgcctcctccacttggccatcgaacctgctgcgtttctgctgttggggtgtgaacggttctggtcgcagtgtgactccgagttgggtcccagtgagcactgcagagtcatattgcaaagtgcatgcggcccgcagcacggcgtcccgcgtctgttggcaccaccgggtcagctcttcctcgccacgctctgtagcattggccgcgaaatcgccacgctctgtagcattggccgcgaagagctgcttcagtcgcgccgcccgtgttctaggcacggagatgactttttcgtggccatgcgtgaagccacgtccttgngcctccaagggtttcaacgcggaacgcgggatttcagctatgccaatctggccggtgcttgcgaagtcgtcctctcgggcaggctccgcatctcggtggccgtactttntcangccaatgaaagcnttcatgcaaagcagctcngantgnacnagntcntccattagaaggaanagncgcacttgtagcattggatgtttggccaatgcccggtgcatggcctgcagtgtgggcatgcacggaacgctgtgtagtagattgacttctcgcttgcccaggggctggccggctccgttcatgagcgtgactgtgatcggtgaatagatgtcggcaaaattcgtagtgaggaagattgtcagtgggccatcatatatgttgagcgcgaagcccagctgtcgtaagccaactttgtaaccctgcgtcagaggtatgttagctgtctggaatgtgatgtactggagtgccttgaacagtggcagcaatttatgttcagcagctgctcgcatcatctcttgcatgctctgttggccgtggcgcgcaaggatggcggtgagcttctcgaagtgctctaccttcgcatcgcatattgtttgcatgtctatgcgccatttcggagcgttgcccttccacatatgttgggttgtttgtagaatggctaccttcctgacggtatctgcgaagatggccatgaactctggggtgttccatcgagattgtggtggtgctctgtagcagccttcagggatgagtgggtcatcggcgtctgattccaagctatactcgagttcttcgcgattcgcaaggtagttaaagagttctcgcattccaatcctcnttggtcggtccaaatttggagcgcagtccccatagaagaactgcacaaacgcagcactccacgcaggtgcctggaacatgttcatcggcttccctgacttgatgtgcaatgttccgggggtgttggcctcggtgccctccatgcgcgcggatgcaagagcatcctccattttcttttggtactcgccacccatcttgtgagcaagtcttctcaattctactaatgcagagccatgtgtggctttctccgcagccagggcagtcgcggcgacgagagcttcctcgctgtccgtgcttgctgcgtgcagacgccgctggtgggcctggtgtangcgtttgccactttcttgtaccagttccaaattcttctgaaagacgatcatgagatcaactggatcgtgagcgtcgctatcctgtattccaatacagaactccgccggcaggtccagtggcaatgcctcggcatcaactttgtctgctgtcgcatccgggccgtgctctgtagcagcggcgtcatcatcgtttaggccgtgctctgtagcatcgattccatcgccgtcgtttacaacttgtccgtcgttgtcgttcgatggtagtgtgcatgtggatgctttcatggctgccggtccatcgagggtcggattgaatgtgtgtaaagtatccattccaattgcagactgcgtgatgnctgtgggcaccgctcgctcgggccactgggtgcgagcttgttctgcgtctatctccactccagcaaacaccgcgtttacctttttgcgatactcggcgcatctaatgtatctttctgtatctatctccagtgcgctgtgtttgccaacgtcggctgctgtcattgtctggttgttgaaacataccgacaggtatttggagatttctgcatctggtggagggagcttctgcatgatttcctctgggcgtggctgggtcagcagaattgtattgcctacgaaacccttctcctgatcatcactgtgctcgctgtatcgcaggactatcagtctacagaccatgattgcaagtccgagaagagattgcatggcaatgctgagattgtagaagagtggatgtactcggccgccccagttccagttggctaacgcaaagaaaggcatgaggggctctggtctgcagagggcagtcgtgcatgacttgcatagccacactggctcgcccgatgcaccgatgcctgcacaccttggtagttgatgctctgtagcagtcgtagcggtggcttcggctggtttctgcatgggcacccttcgcgtgttgag

SEQ ID NO: 1639 - DNA, 4000 bp, Escherichia coli
  misc_feature (1616)..(1616): n is a, c, g, or t
  misc_feature (1985)..(1985): n is a, c, g, or t
  misc_feature (1994)..(1994): n is a, c, g, or t
ttgagttacttttttcaagaataagaagttgatcaaacccaataccaaaatgacgatcagataatcttttaattaatgattttgataaaccaaattgtttttctctttggtcaatgacaatgaagtcatttccggtgccctgcatttttgtaaatttcataattatctttttgtcttgttttttgatattctagctctttttaaagaactataactatgaaagactatctatttacatcagagtctgtttccgaagggcatcctgataaagtcgcagatttgatatcagatgcgattttagatgcgattttggaacaagaccccgttgcgagagttgcggcagaaaccctgacaagtacaaatttagttgtacttgggggagaaatttcaacaacagcaaaagttgattatgagcaagttgtccgtgaaacccttaaatttattggctatgacaatattgactacgggattgattataaaacttgtgaagtattaataaaatatggcattcaatctcctgatatagcccaaggtgttaatggggcatttgacgaccctctggatcaaggtgctggagatcaaggtcttatgtttggttttgcatgtaatgaatctgatcaattgatgccacttccaatacatcttgcacatcgcttggtggagcgccaatcagttactagaaagaaaggggttctaacttggttaaggccggatgctaagtcacaagttaccatgcactataaggacgggaaaccagaaagaatagacacgattgttctttccacacagcatgcgcctgaagtttcccttaaagatttaagagaggctgtgattgaagaaattataaaacctgagattcctaaagatcttattaagggtgaaattaattatttaatcaaccctactggaagatttgttattggtggcccacaaggggactgcggattaactgggaggaagattatagttgatacctacggtggagctgcccctcatggtggaggtgcattttcaggaaaagatcccacaaaagtcgatcgatctgcagcttatgcggcaagatacgtcgcaaaaaatatcgtcgctgcaggtttggctgataagtgcctagtgcaggtgtcatatgccattggtgtggctaaaccaacatccattatggtggatagttttggtacagcaagagtatcagattcagagctttcaaatattgttatggataattttgaccttcgtcctaaaggcattgtaaatatgcttgacttattaaggcctatatatagaaatacggcagcctatgggcattttggtagaacagaacctgaattttcttgggaaaaggtcgataaaaaaggtttaggttgaatttgaaaacttcataagctcttgatttaacgtgagttatgatttaacattcttacttccaaggaacgttgcgagattattcaatcccaggcttggattacaaataataaatttgtaacgacgttcaccatttaccgtaccagagcgggataataggtgaacaaaatccctactggtcacaattttatttaaaggaaaataaattgaatacagtgactgatgtaaataataaaacaaaaaacttcgtagtctcngatataaagctagctaaattcggcaggcaggaaattgctattgctgaaacagaaatgccaggcttaattggtataagagatgaatatgcttcaagccaacctttgaagggagcgcgtattagtggctccttacatatgacaattcaaacggccgttcttattgaaacgcttgtggcattgggagctgaagttagatgggcatcatgtaacatttactcaacacaagatcatgcagctgctgcgattgcagaaggtggaacacctgtgttcgcttttaaaggtgaaagtctcgatgaatattgggaatttacgcatcgtatttttgagtgggaaagtggaaaattttctaacatgattttagatgatggnggagacgcnacacttttacttcacttaggtgttaaagctgaaaaggatatttctgttcttaataatccaaactcagaggaagaaacatgtttattttcggccatcaaaggtaaattaaagaataatccaacatggtattcagacaaaattggccatataaagggagtaactgaggagactacaacgggtgttatgaggctttaccaaatgtttcagaataaagaattgagtttcccagcaattaatgtaaacgattccgttaccaaatcaaagtttgataatctttatggctgtcgtgaatcattagtagatgctattaaaagggccactgatgtcatggttgccggaaaaatagcagttgttgcaggttatggtgatgttggtaagggctcagcccaagccttaagagcgctatcagctcaggtatgggtcactgaaattgatcctatctgcgcactacaggcagcaatggaaggatatcgagtggttacaatggattatgctgctgaacacgccgatatttttgtaagtgcaacaggtaattatcacgttattacgcatgaacacatgaaaaaaatgaaggatcaagcaattgtttgtaatattggacattttgataatgagattgatgttgcatctttatcaaattatgaatgggaggaaattaagccccaagtagatcatgttatttttccagataaaaagaggatcatacttttagcccaaggacgtttagttaacttaggttgtgggacagggcatccaagttatgtcatgggttcttcattcgcaaaccaaacaatagctcagattgagttgtttactcaacctgagaaatatcctttgggcgtgtatacattgcctaagcatttggatgaaaaggttgcagtacttcaattaaaaaatttaaatgctgagttaacaaaactcacacctgagcaggcaaagtatattgatgttgatgttactggaccttttaaaccagataattatcgttattaggagaatttgatggcgaatcttcccccgttaagttttgaattttacccccctcaaacacaagagggggtaaataaacttaagcatacagctaaagaacttaataagtataaacctgatttcttttctgttacctttggtgcgggtggctcaacaaaggagaggaccttagatgctgtttttgaactgagtaattcagattttaatgtagcacctcacatttcttgtatctcatcctcaaaagtagaaattaaggaattattggatcaatataagtcacaaaaaataaatcacttagtcgcgcttcgtggagataatccctctggggctataaactctggtgagtttaactatgccaatgagttagtaagatttattaagttagaaatgggagatgctttcaaaatagatgttgccgcttatccggaagttcatcctgaatcagaaagtgcaaaacaagactttataaactttaaaaataaagttgaggccggggccgattcagcaattacacagttcttttttaatgttgatgcttattttaaatttattgaagaatgtcagaagagctcaatcaatattcctatcgttccaggtattatgccaatttacaatagtaagcaactcattagatttgctaataattgtggtgctgaaattccaagatggttgagatttaaattagaagattatgcagatgatttagattcattaagggagtttggcgtagactttataagtgaattatctgaaacattgattcagaatggtgttcctggcatacacttttatacgataaattactccaagactttatcgaaaattataaaaaatatatcccaatcttagtgcagctctgcttgtttattttgatatatggagtcttcaacaaataggtaactattttcttttccgcttttccataaagtcatcataactatccacctcatttcttctatgttgatatatttctgattaagaatcataatttgatctaaaattatttcaaattcagt

SEQ ID NO: 1640 - DNA, 4000 bp, Escherichia coli
  misc_feature (1985)..(1985): n is a, c, g, or t
  misc_feature (1988)..(1989): n is a, c, g, or t
  misc_feature (1991)..(1993): n is a, c, g, or t
tctcgtcgatttacccgggtacgggttcgcgttcgccaagcaacaccgcgtagagtcgtggaacgaactgatggacaagtatctcacttcgcgcccgaacttaaagcgcgtatacttggtcatcgacgctcgccacggaatgaaagcatcggacagagaaatgttggcatttttgtccaagtacggcgagacgcagtgcggagtgattctgaacaaatgcgactacgtcaacccgaatgagttggcgcgtcgcgcgtacttgattcaagaagagcttcgttacaccaagcgtgctcgcaccatggtgctcatggcgtcaacatccacgggtgcaggcgtcacggagattgctcgcgaaatttacggtatggcgcttgacgatcccagtggcgaagaatacgacgacgacgacgacgtcgagagtgaatcagatggcgagtacggcgagggcgacgttggggacgacgacagtttcgccggaagttcaagtaaaaagacagagttttacggtggtgagtggaaacccggacaaaaagcttcgaagaagtacacgccagcgtcgaaggcagtgccggctgccggtcgtggcggtcgaggcggtcgaggcggtcgaggcgcgcagggcggtcgtggcgggcccagcggtcgaggtgggcgtgggcgaggcggacgggggcgaggcgatgatgcacgcggcgacgaggcgcgaggcggcggtcgaagcggcggtcgaagcggcggtcgtgggcgaggcaagggcttcacgcaaggcacgcccggaagcaactagcgagatttattgtttgtaacaaaccgagtgcgcgatacatgtattaaaactcccacgcgtggttaagttggaatgtcgggttttgcaaaccttgcgtagtgagcacggatttagccacgacttcccatcccttgagctcttccgtgaactcgtagccgacttggaattccatctcgcgagcggcgacgcgggtcagcgccttggcgctaaagtgcttggcgaactgccgtcgggcgctcaactccaactctacccctttatccgtcatgaagtttgccgctaaatcaaaatcacccttacgctgcgcccagcccgcgcgccagcaccctcccggtttgatgtcgagctgatcgtccgccgcggtgtgctgactgactctctgcacgcgcaagtcgccgtactcctcgtgcgtcgtgctgacgtcaaagtccaaatggtccatgctcaccgagtcgtgcaccatggtgtacttggcgttaatcgacaccccatcgatgtccatcttcgattccaacgccggattccacttcgtcttaccgttccaaggaaacggcggcgacggcgcgagcgccagcgtcggcgccttggccacgttgagtaatttttccaagttcaatctcgccttgaactgcatcaactctcccttgaacggtcgcgatttgaactcaatcccaaacgccccgatatcctctcgcgtcgtgatcttcgcgctcttcaaatcgggaaatctcgcctccatcatgctcctcgcccccgccaagtcaaacgccgcccgcgtcgtgctctcgtacgtgttcacatcgatcgtctcctccaccgccttcagcttgaaccacgtcgtctcgcgaatcaagtccttgacgcaatctccgaagcgctcgttcaaaggtttcagcaccttacccgccagcacgtcgcgctcgcggtgcaaatcgacaacctcgcgctgcagtcgactgatttctcgcgcctgcgcgcgcaactgtccttgcagcagcccgagcgtttgcgcggtgtcgtcgtcgatggacgacgcgcgggacgcgcggtgcatcgcgacggatcgtttgtcgcgcgcgcgacgcgcggtgacgacgacacacgcgggcgacgcgtgggacgacgacgacgacgacgacgcgcgcgtcgcgtcgcgcctcgcgcgtcggatttggaaaatttaaattttccaaanccnnannncgctggggtttagggcgggtggtgagggcgcgacgttatccgcgtgcgtcgtatgggtaaacagtcgtgacgctttgcgacgctccgatcgcgccctcgcgggacgatcgctcgcgcgcgcgcgcgcggcacatttcagcgcaccgtcctccgcgacgcgccacgcacgaacgcacggaagactttacgcctcgcgaatccacgcgacgcacgacgctcgacgacgcacacagacgcggagacgactagatacccatcgacatgatcgctcgagtctccacgacctcgacggtgaccgcgcgcgcgtccgcgagacaaaacaagacggaacgccgcgacgccgcggtcgttcgcgcgaacgctaaggaacaagcgtgcgcggcggtgctcgcgatgacggtcatggcgagcccgttggcgaacgccgcggtcgaggtggctcaggtcgccaagggcgacacaaagtcgctcgcgagcgatttgttcgccgagcaacaaaccaagtccacgccggctgcgccgaagaagacgaagcaactcgcgtctccttcgatgccgaaggcgccgtccatcagcgcgccgtccttgccgagcttcagcgcgccgtccatttcgttgccgtccttcagcacggcgaagaagacggacgccaaggcgcccgcggccaaggaagcgcccgcgccgaaggcgaagaaggaatccggtgctggccctaacttggctctcaccctgctcgttctcttctcccctctcctcgccgtgcaagcggtctctttccaaactttcgcgcgcatcgcgaagcaaagtgcgggcaagtaagcgcgacgaagtgtttagcgccgaattcggcgtataaattggcggctttgataatattacatctcttattgagtacacatgaatacgctcgcctcaactcctccccggatttccgcgtttcgcgcggcgagcctcgcgaagccgcgcttgcgattctcgaagttgcctttgcgcgctgtccacgacagcttgaagctcatcgatctccacgcgagctcgttcgttgtcttctacctcggcgatgcgtaagcgtcgttcgcaatccgctgaatcgtcgttgcttttatcgtgaatacgcgcttcggcggcgaaaaagtttctcacgacgtcgacggcttcggcgctaggatcgcgcgcgatggcggctccgggcgctaactcgccgtttttcagtaaatgagcgtgcttgttcgcgaattcggctcggaattccgcctctgacaccttgggagaatcgacgaatttacgcttcgagcctggccttgattgagcctgctcggattgagcctgctgctggtaatgttccgcgatgatttcagaatacgatgagatgtcaaaattcgtcacggcgctcaaaccgcgatctgccacacacgccacgtcgtacgccaccgccgcctctacttcggtatcataaagtcccaaatatctgtacttcttgcctatcatctggccaattctcgcctcaaatttccccttggcgtgtttagtcacgcccctgaacttcgacgaaccttttgaaaatcctttgctctgacgccgcagactcaacactaagtcttccttcgaaatactctccagcgcgttcaactcattcgcataattacgaagatcgaaattggtttgtgctttcatgcctcgacatttgacagcgattacgtcgtacgcgatggccgcttgttcctcgctatcgaaaccgccgagatagacctgcttgcccgcgtcccagatgtgtgcttcgtagcgtcccgtgcggcaatgatgcgtaacgcctctagcgtcactagtacttcttacgtttcgtttttcaaccttcgccacgttcgggcgagagctccgtctagacggcgcctgtcgccgcttcggcgtctcgaggtcgagctcaggaagcccatggaataaatgatcaaagtcagcctgcaaagcgtccgtattcgtgttatcgagcattccaaagtcgaatggaaa

SEQ ID NO: 1641 - DNA, 4000 bp, Escherichia coli
  misc_feature (1)..(4): n is a, c, g, or t
  misc_feature (6)..(7): n is a, c, g, or t
  misc_feature (10)..(12): n is a, c, g, or t
  misc_feature (14)..(16): n is a, c, g, or t
  misc_feature (18)..(19): n is a, c, g, or t
  misc_feature (23)..(24): n is a, c, g, or t
  misc_feature (28)..(32): n is a, c, g, or t
  misc_feature (36)..(37): n is a, c, g, or t
  misc_feature (39)..(40): n is a, c, g, or t
  misc_feature (42)..(42): n is a, c, g, or t
  misc_feature (44)..(44): n is a, c, g, or t
  misc_feature (46)..(46): n is a, c, g, or t
  misc_feature (48)..(49): n is a, c, g, or t
  misc_feature (51)..(54): n is a, c, g, or t
  misc_feature (56)..(58): n is a, c, g, or t
  misc_feature (61)..(62): n is a, c, g, or t
  misc_feature (64)..(65): n is a, c, g, or t
  misc_feature (67)..(67): n is a, c, g, or t
  misc_feature (69)..(70): n is a, c, g, or t
  misc_feature (72)..(73): n is a, c, g, or t
  misc_feature (75)..(75): n is a, c, g, or t
  misc_feature (79)..(83): n is a, c, g, or t
  misc_feature (85)..(85): n is a, c, g, or t
  misc_feature (90)..(90): n is a, c, g, or t
  misc_feature (93)..(94): n is a, c, g, or t
  misc_feature (99)..(101): n is a, c, g, or t
  misc_feature (103)..(103): n is a, c, g, or t
  misc_feature (105)..(107): n is a, c, g, or t
  misc_feature (110)..(110): n is a, c, g, or t
  misc_feature (112)..(113): n is a, c, g, or t
  misc_feature (115)..(115): n is a, c, g, or t
  misc_feature (118)..(118): n is a, c, g, or t
  misc_feature (120)..(121): n is a, c, g, or t
  misc_feature (123)..(125): n is a, c, g, or t
  misc_feature (128)..(130): n is a, c, g, or t
  misc_feature (133)..(137): n is a, c, g, or t
  misc_feature (139)..(139): n is a, c, g, or t
  misc_feature (141)..(141): n is a, c, g, or t
  misc_feature (146)..(149): n is a, c, g, or t
  misc_feature (151)..(156): n is a, c, g, or t
  misc_feature (158)..(162): n is a, c, g, or t
  misc_feature (165)..(165): n is a, c, g, or t
  misc_feature (167)..(168): n is a, c, g, or t
  misc_feature (171)..(171): n is a, c, g, or t
  misc_feature (173)..(175): n is a, c, g, or t
  misc_feature (177)..(178): n is a, c, g, or t
  misc_feature (180)..(190): n is a, c, g, or t
  misc_feature (192)..(194): n is a, c, g, or t
  misc_feature (196)..(196): n is a, c, g, or t
  misc_feature (198)..(199): n is a, c, g, or t
  misc_feature (201)..(204): n is a, c, g, or t
  misc_feature (206)..(206): n is a, c, g, or t
  misc_feature (208)..(208): n is a, c, g, or t
  misc_feature (210)..(211): n is a, c, g, or t
  misc_feature (213)..(215): n is a, c, g, or t
  misc_feature (217)..(221): n is a, c, g, or t
  misc_feature (223)..(227): n is a, c, g, or t
  misc_feature (229)..(229): n is a, c, g, or t
  misc_feature (232)..(232): n is a, c, g, or t
  misc_feature (234)..(234): n is a, c, g, or t
  misc_feature (236)..(237): n is a, c, g, or t
  misc_feature (239)..(240): n is a, c, g, or t
  misc_feature (242)..(246): n is a, c, g, or t
  misc_feature (249)..(249): n is a, c, g, or t
  misc_feature (251)..(251): n is a, c, g, or t
  misc_feature (253)..(253): n is a, c, g, or t
  misc_feature (256)..(259): n is a, c, g, or t
  misc_feature (261)..(262): n is a, c, g, or t
  misc_feature (265)..(267): n is a, c, g, or t
  misc_feature (269)..(269): n is a, c, g, or t
  misc_feature (271)..(271): n is a, c, g, or t
  misc_feature (273)..(277): n is a, c, g, or t
  misc_feature (280)..(280): n is a, c, g, or t
  misc_feature (282)..(284): n is a, c, g, or t
  misc_feature (286)..(289): n is a, c, g, or t
  misc_feature (291)..(292): n is a, c, g, or t
  misc_feature (294)..(295): n is a, c, g, or t
  misc_feature (297)..(297): n is a, c, g, or t
  misc_feature (299)..(304): n is a, c, g, or t
  misc_feature (306)..(309): n is a, c, g, or t
  misc_feature (314)..(318): n is a, c, g, or t
  misc_feature (320)..(321): n is a, c, g, or t
  misc_feature (324)..(324): n is a, c, g, or t
  misc_feature (326)..(326): n is a, c, g, or t
  misc_feature (330)..(330): n is a, c, g, or t
  misc_feature (332)..(332): n is a, c, g, or t
  misc_feature (334)..(336): n is a, c, g, or t
  misc_feature (338)..(339): n is a, c, g, or t
  misc_feature (341)..(346): n is a, c, g, or t
  misc_feature (348)..(349): n is a, c, g, or t
  misc_feature (353)..(353): n is a, c, g, or t
  misc_feature (355)..(356): n is a, c, g, or t
  misc_feature (358)..(360): n is a, c, g, or t
  misc_feature (362)..(362): n is a, c, g, or t
  misc_feature (364)..(369): n is a, c, g, or t
  misc_feature (371)..(375): n is a, c, g, or t
  misc_feature (377)..(379): n is a, c, g, or t
  misc_feature (381)..(381): n is a, c, g, or t
  misc_feature (383)..(383): n is a, c, g, or t
  misc_feature (385)..(385): n is a, c, g, or t
  misc_feature (387)..(393): n is a, c, g, or t
  misc_feature (395)..(398): n is a, c, g, or t
  misc_feature (400)..(400): n is a, c, g, or t
  misc_feature (403)..(403): n is a, c, g, or t
  misc_feature (405)..(408): n is a, c, g, or t
  misc_feature (410)..(411): n is a, c, g, or t
  misc_feature (413)..(414): n is a, c, g, or t
  misc_feature (416)..(422): n is a, c, g, or t
  misc_feature (424)..(425): n is a, c, g, or t
  misc_feature (427)..(427): n is a, c, g, or t
  misc_feature (429)..(432): n is a, c, g, or t
  misc_feature (435)..(435): n is a, c, g, or t
  misc_feature (437)..(455): n is a, c, g, or t
  misc_feature (457)..(457): n is a, c, g, or t
  misc_feature (459)..(462): n is a, c, g, or t
  misc_feature (464)..(466): n is a, c, g, or t
  misc_feature (468)..(468): n is a, c, g, or t
  misc_feature (470)..(470): n is a, c, g, or t
  misc_feature (472)..(478): n is a, c, g, or t
  misc_feature (480)..(481): n is a, c, g, or t
  misc_feature (483)..(487): n is a, c, g, or t
  misc_feature (489)..(490): n is a, c, g, or t
  misc_feature (493)..(498): n is a, c, g, or t
  misc_feature (500)..(500): n is a, c, g, or t
  misc_feature (502)..(504): n is a, c, g, or t
  misc_feature (507)..(507): n is a, c, g, or t
  misc_feature (509)..(518): n is a, c, g, or t
  misc_feature (520)..(521): n is a, c, g, or t
  misc_feature (524)..(524): n is a, c, g, or t
  misc_feature (526)..(534): n is a, c, g, or t
  misc_feature (536)..(537): n is a, c, g, or t
  misc_feature (539)..(543): n is a, c, g, or t
  misc_feature (546)..(546): n is a, c, g, or t
  misc_feature (548)..(550): n is a, c, g, or t
  misc_feature (552)..(557): n is a, c, g, or t
  misc_feature (559)..(559): n is a, c, g, or t
  misc_feature (564)..(565): n is a, c, g, or t
  misc_feature (569)..(570): n is a, c, g, or t
  misc_feature (572)..(574): n is a, c, g, or t
  misc_feature (576)..(576): n is a, c, g, or t
  misc_feature (578)..(580): n is a, c, g, or t
  misc_feature (584)..(584): n is a, c, g, or t
  misc_feature (586)..(588): n is a, c, g, or t
  misc_feature (590)..(591): n is a, c, g, or t
  misc_feature (593)..(596): n is a, c, g, or t
  misc_feature (598)..(600): n is a, c, g, or t
  misc_feature (603)..(608): n is a, c, g, or t
  misc_feature (610)..(611): n is a, c, g, or t
  misc_feature (613)..(613): n is a, c, g, or t
  misc_feature (615)..(619): n is a, c, g, or t
  misc_feature (621)..(622): n is a, c, g, or t
  misc_feature (624)..(626): n is a, c, g, or t
  misc_feature (628)..(628): n is a, c, g, or t
  misc_feature (630)..(635): n is a, c, g, or t
  misc_feature (640)..(640): n is a, c, g, or t
  misc_feature (642)..(645): n is a, c, g, or t
  misc_feature (647)..(653): n is a, c, g, or t
  misc_feature (655)..(660): n is a, c, g, or t
  misc_feature (662)..(663): n is a, c, g, or t
  misc_feature (665)..(666): n is a, c, g, or t
  misc_feature (668)..(670): n is a, c, g, or t
  misc_feature (673)..(673): n is a, c, g, or t
  misc_feature (679)..(682): n is a, c, g, or t
  misc_feature (684)..(691): n is a, c, g, or t
  misc_feature (693)..(693): n is a, c, g, or t
  misc_feature (695)..(698): n is a, c, g, or t
  misc_feature (700)..(702): n is a, c, g, or t
  misc_feature (706)..(708): n is a, c, g, or t
  misc_feature (710)..(710): n is a, c, g, or t
  misc_feature (712)..(712): n is a, c, g, or t
  misc_feature (714)..(718): n is a, c, g, or t
  misc_feature (720)..(720): n is a, c, g, or t
  misc_feature (722)..(722): n is a, c, g, or t
  misc_feature (724)..(724): n is a, c, g, or t
  misc_feature (727)..(727): n is a, c, g, or t
  misc_feature (730)..(741): n is a, c, g, or t
  misc_feature (743)..(747): n is a, c, g, or t
  misc_feature (749)..(749): n is a, c, g, or t
  misc_feature (752)..(753): n is a, c, g, or t
  misc_feature (755)..(755): n is a, c, g, or t
  misc_feature (758)..(766): n is a, c, g, or t
  misc_feature (770)..(770): n is a, c, g, or t
  misc_feature (772)..(774): n is a, c, g, or t
  misc_feature (776)..(776): n is a, c, g, or t
  misc_feature (778)..(778): n is a, c, g, or t
  misc_feature (795)..(796): n is a, c, g, or t
  misc_feature (802)..(802): n is a, c, g, or t
  misc_feature (931)..(931): n is a, c, g, or t
  misc_feature (938)..(938): n is a, c, g, or t
  misc_feature (1104)..(1104): n is a, c, g, or t
  misc_feature (1287)..(1287): n is a, c, g, or t
  misc_feature (1378)..(1378): n is a, c, g, or t
  misc_feature (1383)..(1383): n is a, c, g, or t
  misc_feature (1389)..(1389): n is a, c, g, or t
  misc_feature (1392)..(1392): n is a, c, g, or t
  misc_feature (1401)..(1401): n is a, c, g, or t
  misc_feature (1415)..(1415): n is a, c, g, or t
  misc_feature (1419)..(1419): n is a, c, g, or t
  misc_feature (1425)..(1425): n is a, c, g, or t
  misc_feature (1431)..(1431): n is a, c, g, or t
  misc_feature (1461)..(1461): n is a, c, g, or t
  misc_feature (1470)..(1470): n is a, c, g, or t
  misc_feature (1473)..(1473): n is a, c, g, or t
  misc_feature (1509)..(1509): n is a, c, g, or t
  misc_feature (1517)..(1518): n is a, c, g, or t
  misc_feature (1524)..(1524): n is a, c, g, or t
  misc_feature (1536)..(1536): n is a, c, g, or t
  misc_feature (1539)..(1539): n is a, c, g, or t
  misc_feature (1545)..(1545): n is a, c, g, or t
  misc_feature (1560)..(1560): n is a, c, g, or t
  misc_feature (1563)..(1563): n is a, c, g, or t
  misc_feature (1566)..(1566): n is a, c, g, or t
  misc_feature (1583)..(1583): n is a, c, g, or t
  misc_feature (1638)..(1638): n is a, c, g, or t
  misc_feature (1641)..(1641): n is a, c, g, or t
  misc_feature (1644)..(1644): n is a, c, g, or t
  misc_feature (1647)..(1647): n is a, c, g, or t
  misc_feature (1854)..(1854): n is a, c, g, or t
  misc_feature (1875)..(1875): n is a, c, g, or t
  misc_feature (1962)..(1962): n is a, c, g, or t
  misc_feature (1986)..(1986): n is a, c, g, or t
  misc_feature (2046)..(2046): n is a, c, g, or t
  misc_feature (3237)..(3237): n is a, c, g, or t
  misc_feature (3561)..(3561): n is a, c, g, or t
nnnncnntcnnntnnngnnttgnnttgnnnnncgcnncnngncngncnncnnnncnnngcnncnngncnntnntntttnnnnnantggcntgnnttttnnncncnnnggncnngnccncnncnnnaannngannnnncnancccgnnnngnnnnnntnnnnnttngnnttncnnncnngnnnnnnnnnnngnnngncnncnnnnantncnngnnntnnnnntnnnnngnctncntnnannannnnnggntngnccnnnncnnggnnncntncnnnnncgntnnngnnnngnncnngngnnnnnntnnnnccgcnnnnngnnccngncggnangnnntnncnnnnnncnngggnanngnnncnannnnnncnnnnncnnngntncngnnnnnnntnnnnanggncnnnngnntnngnnnnnnngnngngnnnnggntnnnnnnnnnnnnnnnnnnnantnnnncnnngnancnnnnnnngnntnnnnngnnttnnnnnntngnnnggntnnnnnnnnnnannggncnnnnnnnnngnncnnnnnacntnnngnnnnnngnaaccnncccnntnnntncnnncagncnnntnncnnnngnnnggnnnnnngnngncnnnnncnncnnnantnnnnnnggcangnnnnannnnnnntnnnnnngnngnngnnnaancccaannnntnnnnnnnnancnnnnannnaaannncnancnnnnngngncngcnttnnnnnnnnnnnngnnnnngnccnncnaannnnnnnnnaaanannnananttaagacctcctagacnngcacancctcaatcgcatggaccgcgcccgacagttcttccggaagttgtggcagaccggcgaggccctgcggaaacttccgcgccaactcctcgtagcattcaagtaacggctgctccggattccgcctcaagnaccaagntcgatacgcacgctcgcgcgggtaggtcgtacagatccagtagtcgataggggtcggaaccagtcgcacggtttgggtcgtctccgacttctccccgatgaccagcaacatctccgcgtaacggcccttttgtggcgaggtgaatcgcttgatcgcggcgagtgcnacttcattaaggtggagttggttttccagcacgctcatatctccaggttgttggccgatcagcttcgtattcgcgttcttcacgatgcccgggccgtgcggacgcggctgtatagaggttccaacgaagtcttcgagtgtctgcgaaatgccccagacgctggagttccgtttgcgcgcggtncgaaacagttgaacgacttccggcgccaggacgggcgagtcgagcaatgaccagcactcatccagcacggtaatgctcggctgaccgctcnttccngaagcncgntccgccatngcattcgcgatcancatnctcatngcggtntccaaatgaggatccgatcccagtccctcnacgttgaanaanagccagttgttgtcggtgcggatattggtgtgccgntcgaatanncggctntagatgcccttntcngtccangttcgcaacttgatngcngcnagcttcgcctcatcganggcgcgttgcatcttctcttcgtcctgccattgagcaagttcatcccgcaggtcnganaangtngggaccggattagcgtagcggagccctacccgtttgtaggtccgtccgatcgcctcgctgatgacgttatcgacgagtgtagtatccgagcccggtgcgtcaccgatcatgtgccgggtgaggtttttcagaaatgcgatcttctccttcgacggtgtcttttctccttcgggcaggtcccatggattcagagtttcattgccgtcnagattcacttcgatgactcgnccgcccatgagttccacgagtggccggtatgaatcgccgcgctccaggatggagatctccacgccggtccggcccagcatgagcagnaacaactgagccatgaaggtcttncctcctccgctcttcgccatgatcagcatgttggcatcgcccaagctcggatcgaatggngaaaacggcaccatctggcgcgatggcgtctccagcaagatcccagatgagctcaatccttgccacgggacttcagccggtaacaggtctgctgcatggagcgtcaggcactccagctcgcgtttcgtctcttccgacatccctgggagcgtcccgatgtaaatccttttttgcgcgagagtctccggaataccccgggcgccattcattcgagcgaccgagtggaggacgcgctggcgccggtctgcaagaatacgttcagcctcttccaactcctttgaattgcgtatcgggcgggatgtcctcaagccaacaagcaaactgagctggcacaccttcaacgaactggacacgacatcctggagagtttgaattagctgttcttgtgcaatctgcgcctcgatgttgattttgaagccgccatggatgtctcgctgtgccgcctgcattctcaaaagccgtcgtttgtacgcccgcatgatcttgctttgatccgggatcgtgacctccgcgctgatcaccagcggaaactcctgtccgactagctcgcgcgtgataccggggaatgtggcgtccggcatttccttgacgctgacccaggagtataggagaccgccaacctttaggtggccgtcctgttcgtcttcaatgttgacgttcgcgatttgggcgcgggcgctctcgtaagcgaggccctgcttatacggccgcgtgtcactcgtcagcggattcagtgcccgcttgacttcgagaaacatctcctgctcggtcaaccggcgcggttgcattcccgtggcctcgagtgtggcttgggcgcccgccatcaagctctcaaactccgataggaaatcctcatgttcacgcaccgttcgctggatgcatttgtttgctgagaggctccacttggctcccttcttgcgtgtcttccgccactcgaattccgagctctcatgatggatgtcgggattccagatgaagtaaacgtgcaatcgccgccgcaagtagtgcccttcgttctggcgtgtgttccatagttgtaggcgttcccgatccagcgcctgaagcactgcgttttcgattcgctgttccttgacatagcgctccgtcaggtcgccatggccatccgtcacctcatatcgaacctgcatccgcatcgaccgctcgggcaacgaccttaccaacgcctccagngcttctttggttcgattgcgcgtgtcatccgcgtgaaagaatgtattcagtccgctcgcctcatagcccgctacgaagcacccgttggtgcggatgatgcagccatcgagatagtctcggaccggcagtagttcgcagagcgcgggctggcgcagcgaatcttcccattggcggagcgtttgtggcatttaggatccctctttcaggtattccatgcgctgttctgagtcggactccagtgcgcagtacacgtgcggcttcatgtgaaacatcagccagtcctgcaggtagccacgcggtttcccgtacttgaataggatgagngccggaatactcaacacgggaaccacgtactgcaggaacacgttcatcggaataccaaacatctctcgttgcaagaatcggccgaacatgttcatcacgacggccaggccgaggatgacgaacaaatcctcgaattccaggtaaagaaaagtcaccttcgttgccaggttccttggaaccggtgtcactgtaagtgccatgggcttttcctgtctcgctcgtgaatttgcatcgccgcaattccccttaactaacgcctgccgtgcctttcgtcacgaagaactcgccgagccggagtaggcccgaggccatgaggcacaggatggcccccaggaaatgccgggtatggttgaactggtggtggacctgttgttcaaacagtccgccaaacttcagcgcgcccaccgccacgtgcattccggcatacacgggcagaatg

SEQ ID NO: 1642 - DNA, 4000 bp, Escherichia coli
  misc_feature (1992)..(1992): n is a, c, g, or t
cgagatcgactcaagaaaatagtcgacgacatcaaccgtctcagtgcgtctcaacagcaggaagccggtgtcagtagcgaggagattgatgagttcgacccgcaaattggcgagggcagcgaggagttgacggctgaacaaacacctcgaaagcagtacagtgccgaagaacttctcgccagcccggaaaccgcggcactgtggttgaggagcgtgcagcaaaacggtgggcgcttcctccgcacgaagttcgccatacagctcagcgagcgcggggtcagcgagtaatgggtgcgcgcctagcgaacggttttattagcctattagtcttcttggtggctagcgctggggtaaccgtcaaggcagccaaccctcctgtcttagagcttagtgcagagttagccgctgacacgctggtggtgcctggtcagcgggttcgactattactcaccgtagcaaccccgcggtggtttaccagtggtacccgtatacgcctgcccgaagtgcccgggctggtgctactgcaaaatcaagaattcgctgccaatgcgaccgaacaacggggaacagatagctggacgttacagcgttggtcgatcgatgtattcgcgacgcgacccggtacgctccgcattcccggtgttgatgtcaccgcctcggtgtcgatcaccccaggggtcagtcaaacgctcacccgcaccaccgaaccccttgacctcgacgtgcaaataccctccgaactcgctgagctggagcattggatagccagccccaatgtcaccgtacaagacaccatggtgccggcaggaccgcggcccgtgggcagcgccttgacccgacgagtacgcattgaagctcaggatgttatggctatgatgctgccagccatcgacaccgcatacccccatgagttgcaggcctatgccgctccaccgcttctaaagagtcaagcgtctcgcggcgcgctgagtgcccaacgggtagaaaccaccacactgattgcgaccgaagcggccgacgtgaccctcgatgggattcgcatctactggtggaataccgctacccagcgtctttccacgctcactactgatgatcatgagatcaccattgctggcgcctcaaccactcgacagctgaacatgctacggtccttcgaaatcgcactcaccggcttattactcttgatgggggtactgctgtgtcgagcgctacccctcaagcgatggcggcaacgcctaagccagtggttagccaaaggcggtgagcaactcaagcgtagacgccacgtattggtggctagtccactgcctaaacagctcaaccccggaggtagtcccgccgggccatcagcaaagacccagcgctagaggtagtataatgaggcgcgttgataggaatggatcatgctaggtaaacagacaattagccttattggtttcccaggtagcggcaaaagcaccgtcggcgtactgctggctaaacggcttggcattgagtttgtcgacaccgatctactgattcagacgaaagaaaacgccacgcttgcggacatcatcgcgcgcaacagccatcattatttacgtgccgtcgaggaacacgtgttgaccagcatgtctatcggtcgaagcgtcatttccaccggggggtcggtggtctacagtgacaaaataatgtcacgcttggcacaacaaacccgcatcgtgtatctacaagcccaatatgcaaccgtcgattaccgcatctcactcgctccagatcgaggtattgcctccgctaaacaacaagcactcgccgacatctacgccgagcgtattccactctatgagcgctgggccgagctaacggtcacagtggatggtgctgaccctgaaaccatcgccggacagatcgtcgcggctttggacagttaatacttggcgcggacacgtccatgcattaaaaattcctcccttttggggttatccctccactccctaactcgttgattgcccngttaaaaaatttatttttgtgcgattggcacgaccgttgcatccttcctggcagcggcccacccccgacaggatgtcggtgtagaggaaccagagggacaaggacgtctctcgccaaggaaggcagtatgtggtgggccgctatagtttttttagttatttatagggcgctggaaagcacaaaaaatttgttgctctgttggctaacttgaggccaactcagcagaacagaaagagttttttgttctagcgttttctaaatcatcgggaggtgatttatgagtgggcgtgaccagcagcaaaccactgaagccgacagtgtcgaagattttttcgatacgacggggggtgaattcagtaccggcgacttcgacgacgatctaccggggttagaggcactcaacgaccgtactttgctcgccagtaaacggcgacgcgtcgagcaacggctcgaagcactcaggctgcgcgacgagctcggcgatgataactttaaatttgatgacgatttctgaatcgacgcgccagtccacactggacggcgggtaggtgctctaaacagtgtctgcctaatcattctaactgcgtgtgctgatcgatttctctctgccattcaaagacgtttagttcaataaagacaaaggcgaatagccacagcgctgcatcccaaaaatcgaggaagtcgccttcaaatccccaatagatagccgcggcggcaagtaccaagtagagcatgattttagtggcggttaatccccactgcaggcgctggggcagtccgccctttaactgcacatgcacttcaatttccagtgcaatgacaacgagaatccatgcgcccgcgttgacgacatcgacaagggctaaatcttgagcatcggcaaagatcctcggtgacgcgatgacctgatgcagggcggagatttgcaccgcgtcggcattcaacgcgctgcaattagccgcatttaagggcgtaaaactgtcgaagccgagtaatactgaccaatcttgggtcaccaaatcgcaggcaggttcgggaagactggccgcctgacgaaacacttcccactcgccaatataacccagaaaagccgacacaatcgcagcaccacaaagccagcgcagaccgtgaagtgaccacttagtagcgcctaccagtcgggtatccggcaggattgctgtttccagttcgaacagcaaaagtagcaatacccaggcggcggtatcgagagtggcagagaacaactgaacgagcgaagcgagatcgagctccgctatgccggcgtgcgtggcagaaatgagctcctgctctaaaaacaaataaacattgaaagacagtaataggaaggtgatgtatttaatggccacaaaccatcgatagcctaccgaccgagggtccatagcggctgcaaactcattcatcgatcaccctccccttgattacacttgaagcagcaggtgctctcgctcccaggagctaataacgcggttaaattcttcgaactcgtctagctttaccgctgcataggcccgcataaatagctcgccaatcatttgttgaagttcgggagtgtcatttagctggcgaacaccttcttcaagcgttctggccaccaccacgcctgcttcgtttgcggttcctctgtggggcggggtaggcggtaattgctggcgcatacccaataggccactcgccaatgtcgcggcaatggccagatagggattagcgtcagctccggggaaacggttttctatacgcaggttttccgctgttccattgggcactcgaaatgcagttgtccgattatcaaagccccagctgaggttaatgggcgccgagatatcaggcgctaatcgccggtaagagttgacattgggcgcgtaaaaactgatgagctcaggggtgtagcgctggaggcctcccaagtaatgcatcattgcctcggtgggagtgccgtctgatcggcaaaaaatattctccccggtttctttattgagaatagattgat

SEQ ID NO: 1643 - DNA, 4000 bp, Escherichia coli
  misc_feature (1986)..(1986): n is a, c, g, or t
  misc_feature (2866)..(2866): n is a, c, g, or t
  misc_feature (3201)..(3201): n is a, c, g, or t
  misc_feature (3759)..(3759): n is a, c, g, or t
ggttgctatctggtccccagaaacgaaattcaaaatctggtatgagatcgaggcgcatgcttgcgatgcgatggccgatctgggtgtgatcccgcgcgagaatgccgaggccgtttggaaagccaaagacgttgagtttgatgtggcccgtattgacgagatcgaggctgtcaccaagcacgacgttatcgcgtttttgacgcatctggccgagcatgttggttctgatatggcccgctttgtacatcaaggcatgacgtcttcggatgttttggacacgtgtttcaacgtccaattggtccgcgcgtctgacttgctgctcgctgatatggaccgtttgctggcggcgctgaaaacccgcgcgatggagcataaagacacgccgcgcattggccgctcccacggtattcatgcggaaccgaccactatgggcctgacatttgcccgcttctacgccgagatggaccgcaaccgtgcgcgtctgatcaatgcgcgcgcagagattgcaacgggcgctatttctggcgctgttggcacgtttgcgaacgttgatccacgtgtggaagagcatgtttgcgaaaagctgggcctgacgccagagccgatttcaacccaagtcatcccgcgcgaccgtcatgcgatgttctttgcgactttgggtgtggtggcctctggcatcgaaaatatcgcgactgagatccgccacatgcagcggactgaagtgcttgagggtgctgagtatttcagcgtcggtcaaaagggctcatccgcgatgccgcataagaagaacccgattttgacggagaacctgacaggtctggcgcgtctggtccgtatgtcggtgatccctgcgatggagaacgtcgcactgtggcacgagcgcgatatctcgcattcctctgtcgagcgcacgattggcccagacacgacaatcacgcttgattttgcgctgaaccgtttggcgggtgttgtcgagaaaatgatcatctatccagagaacatgatggcgaatatgcacaagttccgcggcctgatcatgtcgcagcgcgtgctgctggcattgacccaagcgggcgtgagccgtgaggacagctattcttacgtgcagcgtaacgccttgaaagtttgggataataacgccgactttaagacggaattgctcgctgacgcagatgtgcgcaaggcgctgtctgccgaagagatcgaagaaaagttcgaccttgggtatcataccaagcacgttgatacgatctttgcccgcgtgtttggcaaagcctaaaagatcattcggcctgacgcccccgcgtcaggccgatcgatatgcggcttacacgacggatggtcgtgaagcggctgtggttgtggacggtgtgtcgcccgaggaatatgcggcatagtacgttttgcaggcatcgacagcacagcataacgacgaccatcaccctcattgagatatggctctccaatccgttcggcatcaaagccaagctgacgcagcgcacgcatcagtgccaagggtgagagcgacatcaggtttgaggcccccttctcggctgcgacatcgaccaagccttgcacgatcaagccgaggcatttgctacgatccgcgtgggtatcgacgtcattggacatcacaaggcgggtacattcccacatctcgtttgtctcgacgtccgctttcatcacgcttggcgggatgtcgatcagtttgcctttaagcgcatcgcggagcatgtgggtgtggttgccccattttgcagtcgttggcatgacgcgcgcgccgccaatgacctctccatcacgcaagacgaccgaatagtaggcctgcggattgtcgtattgatccatctccaccgaatcatcgtgtgggatatcccatccaagctcatcgacgaaaaaccgcttccgaagtgcgagaaaatcgaaaaatgcggttccatgcaaatgaagttgcgcgaggttaaaagtaatttgttccatgtccgnctcctatgtggcgagttaaaaataccactacaccttatgattgtaacaaattcctgcgacaatcactcgataccgaatcggcgttaagtcttagttaaccattttaggagttgggacgctcagatgaggccgtattggctcgccatggcggcggcttgggagccggtttttgcgccaagtttgagttttgcgttcttaaggcgctgctttaccgcgccttcggtcacgcccagtatatgtgcgatttctttcaggcgtttgccgtcgcggaccatgccgagcgcctctaattcggccatagtgaggttctgtggtggcgccatttcagcatgacggcgggacataaacgcttgaagtaacttaacttctagctcctcgaactcgcggtcattgcgcgcaaacgacccgtaggatcgctggccttccttgttcccgtcaaaaacagaaaccacgacgccgtagcgcaacccaaaagatttggcctgcccgagcacattgcgcggatcatcttgttcaagttcgctccagcgcatgcatcctatggtcgaataggcccagcggatcacgggatcaaaaagcatgaatcggttcagcgtgtaatggtcgatccagccttgcgggagttcgttcacttcttccacgggataagcaaagccgattctcaacgcaaaatagtgccctgcgggcgcaataatgcggagttgctctggatccaaccgttgggtcataaaatagtttttcttaccaagctgtacaaaaacgcatgttgcttcttggtaaatttccttagctttttaatccgtttgttaatttgttagtatttcgttagggtcaactttggcaaccactttggcaaccacaaagaaagaataagtaaatngcaaaccaaatcgcgatccgcgattcacttgcggaccttaagggcattgcaagcgcgggctatgcgttagctttccatattcggtttacgacgccgacctttctttttcagacctatccgaaagactggctcgattattactcccaaaacgggttggtgatgtctgaccctacggtcgcgtggggatttgaaaatgtcggggcaattagttggtctgacctgtcatcggccgattcgaaaggcgtgttaaaaagcgcaggcgaatatgggcttaatttcggaacaacttgcgcattagaggttgaggggagccgcagtattggcagttttgcccntgcggaccgcgagtttaccgcgcaagagcagaaaatcttgagtgaaacgatgggcaacatgcatgcggcaatgacggatttaaagacgctatcgcccgaaacagcggccgcgttgcgtatgatgtcggtgcaattcacacatacttaagtctttgttcacgcttcatttagcaattccatgccagaacatatggcatggaagcaactctctctccccccctttctcggcccaaattgcctgcgatgacccgtaagcgaaaagcggcgatgatcgtgcaacttctcatcggtgatggggggaagctgaagctctctcaattgcccgaagagttgcaggttttgctcgcccatgaagttggtgccattcgattggttgatcgcgaaacggtgcattccgtcgccaatgaatttgcagcgcaacttggcgcgattggcctgtccgcgcccggcggcacagaaagcgcgattgaagcattggcacagcacctgagccctgatctggccaatcggctacgtgcagacctgagcagcgccagaaacggcgacccttggccgatnatcgtcgcactcgatgacactgtgattcttgaaattatgaacacggaaagcgtcgagatttgtgctgtgaccttgtcaaagctacccgtgtcaaaagcggccgcagtgcttgaaaagttaccgggcaatcaggcgcggcgcatcacttatgccatttcagagaccgagaatatcgtgcctgatgcggtgaagcgtatcggcaccgcccttgtgcatgactattgcaccaagaaaaccgtgg

SEQ ID NO: 1644 - DNA, 4000 bp, Escherichia coli
  misc_feature (29)..(29): n is a, c, g, or t
  misc_feature (137)..(137): n is a, c, g, or t
  misc_feature (305)..(305): n is a, c, g, or t
  misc_feature (860)..(860): n is a, c, g, or t
  misc_feature (992)..(992): n is a, c, g, or t
  misc_feature (1125)..(1125): n is a, c, g, or t
  misc_feature (1228)..(1228): n is a, c, g, or t
  misc_feature (1324)..(1324): n is a, c, g, or t
  misc_feature (1351)..(1351): n is a, c, g, or t
  misc_feature (1393)..(1393): n is a, c, g, or t
  misc_feature (2197)..(2197): n is a, c, g, or t
  misc_feature (2212)..(2212): n is a, c, g, or t
  misc_feature (2518)..(2518): n is a, c, g, or t
  misc_feature (2776)..(2776): n is a, c, g, or t
  misc_feature (2882)..(2882): n is a, c, g, or t
  misc_feature (2900)..(2900): n is a, c, g, or t
  misc_feature (3899)..(3899): n is a, c, g, or t
gcgaggaagagatgcttgaggattattcnctttcccaggactatgcagagcatattaagttcatggaaataggttccacactgcgtccctatctctctccagaagtttttgcttcctattgggaggaagaacgtacnaaaatacagacacaagagtatctcaataagcgcctttataatttctctgggaaatacggagaaaacctcttggaggaagtgtatcgctatgccttggtagcagggactatagcgagcaaatatgattttgatattattcatgctcacgattggctgacctatcaggcngggatcttggccaagcgtatcagcggtaagcccttggtagttcatgtacatgctaccgaatacgatagaggaggggagtataaccgcaattctatcgtatatgagatagaaaaaagcggcatgcaccaagcggatcatgtgatcactgtaagtgattggacacgagctatagtgatagagaagtatggagtagctcccgagaaagtgagtactgtacacaatgcagtggatttctccgatgagcagttagaccttcctcctcgtgcgctcaatgaaaagattgttaccttcttagggcgtatcaccttgcagaaagggccagaatactttatagaggctgctgcaaaggtacacaagcgcttacccgatgtacattttgttatggctgggaatggggacaaaatgactccttcggtaaggcgagtggcacagcttaagctcggtgggcattttcattttacaggatttctaagaggaacagatgtacaacgtatgttccgctatagtgatgtatatgtgatgccctcggtatccgaaccctttggtatctccccnctggaggctatgcgaataggcgtgcctacgattatttctaagcaatcaggagtatcggaggtattgcaacatgccatcaaggtcgattattgggatgtcgatgccttggccgacgctatctatggagtactngcctatccaaaactcgcccaatcgctccaaaaggaaggacttacagaggtcaatgctctcaagtgggagggagctgctggtaagttaaaaagcatttatcagacaatgatagcttaaaaaaaagagctacaangttagtataattgagaaaaaaaacgtatatttgttaccaaagaaagacaaccatgaaagcgatatgtttctattttgaagttcatcaccctgaacagcttcgncagtatcatttttttgatataggcaaacaacatgattattttgattattacttaaatcgtacagagatagagcagttggctcgtgagtgttatctncctgccaataatctcttattggagctnattgctcaatacaaaggacgctttagggtagctttttccctntcgggaagtgctattgaactcttagaattgcatgctccagaggtgattcgtagttttgaggctttggccaaaacaggctgtgtggagtttctctgtgagccttatgcacattcgctttcctctctttccaatactaccacagaattcgaaaaggacgttcgccggcacgctcagcgaatagagaaacttttcggtcatgcccctacagccttccgcaatacgtccctaatctattccgatagtataggggaacgtattgctcgcttggggttccataccatactcaccgaaggggctaagcatattttgggctggcgcaatcctaacttcgtgcaccatcaccccaataatgacaaggtaaagatattgctcaaaaatgctaaactcagcgatgatatttctttgcgcttttcctcaagggattgggatgaatatcctttgaccgcagaaaaatatgctcgttggctaaaggccagccttcaggagggggatgtggtaaatcttttcttccgctatcaggctttcggtaagtataatttggcttcttcgggtatttttgatttcttgcgctacttaccacaatatatcttggacgaggagcagtatgctttccttaccccttcgcaggtggcggaaacttttcccgctaaggaagctatctatgtacccaatcctatctcttggacagatgaagagcgcgatattacctcatggctggggaatgaactacaagagaatgctttcgaggaactctttgccctaagtcctaaggtagaaaatattccagatgaagccttgcatcgnacctatagtcgattncagtgtagtaatcactttaactatatgagtactaagataatatctttggaacaacgtcttaagaaagtatctccttatgcatctccttacgatgcttatatcaactatatgaatgttctaagtgatttctctttggagatagacaaggctttggccaaacaggtcaaaaatgaggtaacactacaagaattttagtctttgtttgtcttagaattggaaatagatgaaggcgggagcatcattggagaaagtctgataacagattacagctaccacaaccatcacaaggacttttacccaaagatnactgcggtaataggcctgctctaccttgtccttgagtgactgaggaagccaatgtacagtatagcctaagatcatcaccaagaaggcttctctgaagtaccataatacttgaccactacttgcccagtccatattattccatacttgtccataccattggttgatatgctccatgtcttctccacggaagtagagacgaacaaagacgataaagaggaaggtagagaacaccttccagaagtgtgccaaccaatgggnggaatgctcataagggcttaccttgcgccagagtttgtagaagacaatacccaagccattgatccctccccataggatatatttccaagaggcgccatgccagagncctcctaagagcatggtnagcattaggttgatattggtagtgatatagtgctgaaaacgagtgcttttcattgctaataaggtgccccctaagagcaaaaagcctataatcaatgagaaatagggattacctactccaatgagagctaccacgacaaagaccaaagcaatggccaccgatgcccatgagcctgtacggtttcctcccaaggggatatataggtagtccttaagccatgtggaaagggagatatgccagcgcttccagaagtctcccgtattgatagccttataaggggaattgaagttgcgagggagctcaaagcccatcagcagggcaagccctatagctatatctgtatagcctgcaaaatctccatatacttgtagagagtaacctaccaaggccataaggttcgtaaatcctgaatacatggtgggcatctcaaaaactctatccaaaaactctacagcgataaagttggcaaaaagcattttcttaatcagccccttaaagataaagtaggtacctcggttgaagtcctgtgctgtgatttctgtagggcgaagtatctgagggacaaattcttctgcacggacaataggccctgctactaactgaggaaagaaggtgacatagaaaccaaaatccaaaatagaatccaaggacttgagttttcgcctatagatatccactgtatagctaatggtctggaaagtatagaaggaaatacctacaggaagcacaatctcatctacagagaaagcacccttggaggaaaatccatttccccaataagctaaatagttgaataccttgtgatcggtgtggaaaatggtattgtaggtatcggtaaagaaataagcatacttgaagtaactcagcacagtaaggttcagaacgacactgagggtaacgaagaatttccgcttggattcattctcacttttatctatttgtttgccaaaatagaaatcggttatagtgctgaatatcagtagaagtacgaatagtccnctggttttgtaatagaaaaagcagctaacaaagaacaaaaacaaatttcggataaagatacgcttgtataccagagcgaaacctatatatatgataacaaa

SEQ ID NO: 1645 - DNA, 4000 bp, Escherichia coli
  misc_feature (150)..(150): n is a, c, g, or t
  misc_feature (443)..(443): n is a, c, g, or t
  misc_feature (2054)..(2054): n is a, c, g, or t
  misc_feature (2150)..(2150): n is a, c, g, or t
  misc_feature (2383)..(2383): n is a, c, g, or t
  misc_feature (2680)..(2680): n is a, c, g, or t
  misc_feature (2686)..(2686): n is a, c, g, or t
  misc_feature (3143)..(3143): n is a, c, g, or t
  misc_feature (3448)..(3448): n is a, c, g, or t
  misc_feature (3688)..(3688): n is a, c, g, or t
tcctttagcagccgtgaaatccgggccagagcttttaaatgatcggcggcggcattttccggtgcgaccaggacaaaaaacaggtgcgtcggagccccgtccagcgaagcaaaatcgatcccctcggggctgcgcgcaaaaaccccgacnactcgctcgacaccgttgagtttgccgtgcgggattgccacgccttctccgatcgctgtggtactgattcgttcccgttcgagtagcactttgaggactttgctcttatcgagatggtgcgtcgctcccaaatactcggccatttcctcaagcgcggcatttttatcgcggctcgccagtgcaggaactatggtttctcggctgagaaaatcggtgatcttcacgcgctggactttcttcgctcaagcttgattttttctttttgcttggtgatctggcgctcgactttgtcnatggccagatcaatcgcggcatataaatcatgatgctcttctttggcgagaatcgtcgtgccgcgggtatggagatcgagttcggcgagttggcgctctcttccgtccacggcgagaatcacatgagcctccacgggatggtcgaaatacttgccgatgcgctggatcttttgttccgcatagcgcttcagcgccgcggtgggttgggtatgtcggaacgtgaccgaaactttgatctcgctcatcggtggcgcgcgctcctcaggaggactctatttgcggaagaacggctgtcttcgctttgaagaaggtagaatgcccatcgcctcgcggtattttgccacggtgcgccgcgcaatctcgatcgagtccgtcgatagcgccgcagcgatatgctgatcgctatagggtttgcgcggatcttccgccgagatgatgtggcgaattttttctttgacgctttcgctcgctacgtcctcgccgttgcctcctctgaggccgctctgaaagaagaacttgagctcaaaaagtccttggggagtatggacgtacttattggcggtggctcggctcacggtggactcatgcatgtcgatatcttccgcgacatcgcgcaagaccatgggcctcaaatggctcacgccatgatcgagaaactcttgttgaaatttgaaaatgctctgggtcacccgagacaatgtctgttggcgctgttgaatgctcttgatcaaccagtgggcggcgcgcactttttcctgcaaatattggcgcgcttgttcctcggccgctccttcctgaccggcaagacggcgatacagcgagttgacccgtaaccggggcacgccatcatcgttcaggaaaatcacgtattcgccgccgaccttctcgacaaagacgtccggcaaaacagtccgcacttcatcttgctcgaaacctcgcgacggcttcggctcaagactggcgatgagatgcgccgcttcggcgatttcatcaatcgtcacggccaattctttggccagtttttcataccgtttggattcgagaaagctaagataattggcgacgattttggctgccaaactatcgctcagcttgaggttctcgagctggatcaacaggcattcgcgaagatcgcgcgccgccactccgacaggatcgaaaaactgaatgcgccgcagtacgacttcgacctcttcaggttgagtttctgttgcgctacaaatgtcttcccggctaagcacgagataaccattttcgtcgagattctgaatgacatgcagcccgatagtagactcgcgctcggtgatttttgaaagacgcagttgccaaatgagatggtcttctagggtggttttcttggtcaggctgttttcccaggatggtggtgcgtcgccgtcttccgaagtcgcttccgccgtgagagaaccatggatcgaattggagtgggtatcgaggtattcttgccagtcgagcgtaccgatcttgtccactgcggacaattcgcggttgaccaccaaatccgctgggtcgctcgcggtggccaccggcgcctcggcccttggctgttcagcagtaccctcgggttcttcagtgggtccttcctcaagagcngggttctcctgaagctccttgacgaccatctcttccaattccactcgggacagctgcaacagcttgatggcctgctgcagctgcggagtcattacnagctgctgggtcagcttttgtacctggcgaatctcaagagccatatctaaaacttaaaaccttctcccaaataaaattttcgcgctttttcgctcccggcgattgtttcgggggtaccctcttcgagtattgtgccctcgtttacaatatacgctcgatcgcagattcccaacgtttcacggacattgtgatccgtgataagaatgccgatgccgctatcgatcagccggcgnacaattttctgaatctcagccaccgcaatcggatcgattccggtaaacggctcgtcgagcaggagaaagaagggcgacaatactaatgcgcgagcaatttccaccctgcggcgttcgcctcccgagagcgtatatgccttgtttgctgcgaggtgctcaatacctaacatcttcattaatccgtcggctcgctcctgttgctgatcactgctgagttcgagtgtttgcagcacggctcgaagattatcttctacagagagacgccgaaacactgacgactcctggggcaaataactnatgccngctctggcccgttggtagatcggcgcttcggtcaaatcgtcgtcgttcataaacacccgaccctcatccggctgaaccaaacccaccagcatatgaaaagtggtagttttgccagcgccattgggcccaagcaacccgacaacttcgctgcctctaacctccaaattgatcccgtcaacgaccctccgtccgccgtagcacttcatgacagaaaccgctttcagcagactcatttctgcgcggcatccccttgctcccggttcttcagctcctctggaaaaactgtcgcctgaactctgatcttcccgtcaccctcagttaccgcccggtcctgatccatatagtacaccactttagcaccgctcacttggctatttccctggcgcatcactgggctacccgtcagtgttacagtttttgttttgtcatcgaacacagctttgtcgcccgtggcaanccgattgccttgcgtggcgttcaccttgccctccgcgacgatttgcttcatctgtttcatctcgggatcataataagcggtgagcgtttcactgcgcatggtcatatcggcttgaatggtgaccactcgccccttatatgtaatcgagttttttgtctgatccacttccatccagtctgcagtgatatagatagggtcctttttgttgaattcaaatgtcgagccctttttgccttcgtctttcgtcggcgctgctgcgccggccggcacggtcgaaaagatcaaacacagccctaacagcacgncagctctctgtattcgacccatagtcattatcccccgatcggcgccgctgagctagggctattcttcttcttcgccagtttttcgggctcgatcttggacttcaccgcgcgcacaagacgaacttttttgtcttctatctccacttccatcctcgcgccttctagttcgatcccctctcctacgaccgttgtccgattcggcagaacaatttgatccttggcgggcaggtagttagcctnctctgatttcagtatgtatccctgaaaagtgacctgaacatcgccatgcagttccatccgctccagttccttttcgttgagatagaggagagcctcattaccaatcgtctcagcaacttcgccttttttgtcgtagtaataaaagcgcggctttttgatcaatgcttctttctgttctttgaaatagctggcctcgtcgccgaataattcccagacctttcggccgtcctctatcttggcgcgatggaactctttcagtcgaagcgaagactcgggaaggtagtccaacgctttcattggagttgccttgat

SEQ ID NO: 1646 - DNA, 4000 bp, Escherichia coli
  misc_feature (1396)..(1396): n is a, c, g, or t
  misc_feature (1736)..(1736): n is a, c, g, or t
  misc_feature (2402)..(2402): n is a, c, g, or t
  misc_feature (3697)..(3697): n is a, c, g, or t
  misc_feature (3771)..(3771): n is a, c, g, or t
aaggagccgacctgcttatctacgacgcgcaatatcttccggaggaatacgaagctcacaagcgaggctggggacacagccactggcgcgaagccatcaacgtggtgatggagagcggggcgaaagagttgatcttatttcatcatgacccggatcacgatgatgctttgatcgataaagtagtgcgggaagcacgaaattactatccacgagtgcgcgccgccgctgagggcatggatctgcgggtttaagtagcaagcctctcagccctcaccaactcaccgcggtaagggctgtgccatgctggccagcgcatatcccattacggccatggctgctgcgttctcccgcaactgggcgggaacgaccttgtccagcgtgtcggcggctgtgtggtggtagtagaagtaagtgcgggcatcctgcaaaatgccgaaggccggcactcccgctttcgccagcggagcaatatcggcacccggactatcgttggtgagcttgattacgttggccccgaaacttttcaatatattctgcagcggctgcagcaatggaactgcgatagaagtaattttggcgtcaaatccaagagggtggccagcacccgagtcgctctcgatcgccgccacatgattggaaaattccgcctgctcatccttggcatatgcgtcgtgtccccggccgccgttttcttcgtccatccaagcaatcacgcgcaaggtgcgcttgggacgcaaatgtaattgttgaagaacatgtgcggtctccatcgcgaccgcgaagccagccccatcgtcgatggcgccggttccaaggtcccaggaatccagatgaccggagacgatcacgatctgctcgggatgctccgatcccttcaaatctccgactacgttgtagctagttacatccggtagcaattggggtgtgagtgtgaggtgcatgcgcactctgccttgagcggcgagatgggcaatcagatcagcgtcttccaccgcgaccgcgcctgcgggaataccggccgccgcgctccaaccggtgtgcggtaaacgaaagtccgcgctgccaactgaacgaatcaatgaggcggccgcccccaattgggcggctgctttagcgccattaccacgatagataacagcctcgccgtacgcctccattgctaagccattcgccgccttttccttatcgaatggaacgttgaacagcacgattttgcccgccacctgttcacgtccacgggcattcaattcgtcaaaacttttcactacaactacgtctgtcgtaatcccgcctgccggagtcgatgtacttcctccgagagcagtaagaacgaccttctgcgtggttccgggggcttgtccgggaaactcgaccaggtcggcgttctccgtgccgngcacccagtgaggcgcctttacctgttccaaccgcacctccaggccaagcttgcgcaactcctccgcaacatattcgactgcggcctgagactgtggcgaaccgcttattcttggaccaatgttttcagtaagatgtgcaagttgctggtaggtgtagtcgtcgcgcagagctgcatcccgaattgaagctaactcccgcaatagctgtggcgagaaggcttccgcgaccggcactgcttggggtgccaaatgcggtgcgttatgctccgatggcttaacgtgggaggaaacctgagacatcgcgggacagaatgaaatgagaagttccaatagtagtgnacgaactgttggtgtaagacgaagaacggctttcagagtggacatttgatctgatttttccctaagtaacagttctgtgaccgcgtttactgattgtaccgtgatccccgcagggactccctttagcccgactgcaacaggcgcccggaacgtcagtaatctcagctgagataagtagttaccgcggaactctctttcatacagcgttcactgtattggcgaatggctatggctttgtcatacttccggcgggctaactgtacgttatgagcgacactcccggaattccgctggatttcacgacgacggtcgagatatgcacggcgaacactgccccctacggtgccacgtcggttgctcctccggtgagtttgggagacatcggtcatcatgcgcacgctgtccagttctatgccgatgacagcttcctcctggaggctttaagtcgattcattggtaccgctttgggagccggcgatgccgccctcgtgattgcaaccaaagcgcaccgggatgggcttgaacagcggctaaaggcgcgtggactggagaccatcacggctgtgggacagggccgctatgttgtagtggacgctaatgagactctagcgaagttcatgcgggatggatggcccgatgcggacctgttcgccgacactgtgggcngtgttcttgccgcgaccaagtcagccgctcagtgcgagggtgcccgggtcgccgccttcggtgagatggtcgccgtgttgtgggccgagggtaagcccaatgcggcaatacggctggaacagctctggaatgagctggccaaggaacactcgttctctcttctctgtgcctacccgatgagcgccttctatcgggaggagcacggcgcgcagttattgcaagtctgcgccgagcattccgctgtgattccaggtgagagctacacatccctcattacagaggaagagcgtcttcgcactattgcctacctgcagcagaaagcgctggccttggggaccgaggtactggagcgcaaaagggtggaacaggtgttgcgcgtgagtgaggaggcgcttcgaaaatctcacgccgacctggagtatcgagtcgaacaaagaactcgtgaactattcgaactcacttctcgtttacgggccgaggtcgagcagcgcaccgtagcagaggctcatttgcgtgagttatcggggcgattgctcagtatgcgcgatgaggagcggagaagaatcgctcgtgaattgcacgacagtaccggtcaactgttcgtggctctccaatggaatctcgcacttcttcagcagagtgtgagtaacgtggatccggccttagctgagaaggtttccgagagtgtccgtatcgctgatcaggccatcaatgaagtccggaccatgtcctatctcttgcatcctcccatgctcgatgaagccggattgctgctggcgattcactggtatgtggacggctttgtgaagcgcagcaatatcaaggttgatctggaacttcctgagacgctggagcggctcccccgagatttggaaactactgtcttccgcatcctgcaagaagcactcacaaatgtgcatcgccatgctggaagcagcacagccagggttcaactcaccttagcttcgggtaacttgggactccggattcaggatcaaggtaagggcattcctcggaacaaaatagagggttcgcagaacgttggcaccagaataggtgttggtatccggggaatgcgagaacgggtgcggcagttcggtggcgagcttcagatctcggctggcaacccgggaacctgtgtggaggcgatctttccactgcctcgtgaccaggaacgaggatgcagttactaaagcccttcttccacggtggttaacgcttcagaatgttttttgactggacacagacgttggtgccactccagctctgccgggtgctttggcggcctccggcantggaaaactcgcaataatcacggttccctttccggctgtggattgaatctccacgcggcctcccatctcgtgcnctcgttccctcattccagccagaccaacaccaacgccggtcccggtgagctgaaaattctcgatcaactccgttggcatcccaataccataatctcgcaccgtcagcaccacctcgcgctgcaggcgcttcagttcaatttctgccgtcttactttttgaatgccggtgaatgtttgtcaggctctcctgtagaacgcggaagagcgcaagttcgacaggttggggcaa

SEQ ID NO: 1647 - DNA, 4000 bp, Escherichia coli
  misc_feature (3792)..(3792): n is a, c, g, or t
  misc_feature (3794)..(3796): n is a, c, g, or t
  misc_feature (3857)..(4000): n is a, c, g, or t
aaaattaatttaattaaaaaaattttaatttaaaaaaaatggatgacatttaatctttattaatacttaaacattcttttattttacttttttttaataaaatatatatcaaataataaagaattaaatttgaattaattatgacaaaaattaataggtgaaacaataataaaaaaaatataattaataattttatttaatataaagaaataataatagtaaatacataaatagattaaattttacgttaaaagaaatcaatattatttaaacattattaacatttaaaaataatattctattaatatgagttatttctatatttgtaaatttgtttataaaatataaaaattaataacctttaattaaaaagtcatatccatgacccaaattaatattaaaaaaaaactttttctttttttataatagctgaatgatataaaataaaatatataatttgtatcatatataaaataataaaatgattatagattttatatattagtatatatatttttataatacgttatttaaaattttattatatatattttagacgttttgatgtattatatgttgttaatctatttttaaagtagtattagttgggatacagtaaaaatttattaatgatgtaaatataaggaaaaaaaatgcaaaaaaaaaacatatatcaaatatggtataaaaatatttttattttattggttaaataattgttttataaaattaaatttaaaaattacaaattaaatcagcaagtattttaattactgaagataaaggaaaaaagggaaaaaattgtatcaaatcaaattctactgtaatgttacatcattatggagtatttttttaaattttatcaaaaactttcgttatattaaaaaaaatacattatatttaatcgtggttattattggttttaatgaatttaaactaaatttaattattttgttaagtttcatactttattaattaccgttaatacgataatgatgataataataattaaacgaaattaaaataaataataaatcataataaaaactaaaattaaaaatagcaatattaaaaatattaaataataatattgaaataaataaataaataaataataaatagtaaaataaaatatatatataatttttgtttattgttaattataacttaaaaaactattatacctttttttaaaattttataaatacaaatgataaaggatacttataaaaaattaaaaaaagtttaattagttctatgataaataattaaaaatattattagagtcatacgaaactacgaaactaaacactaacaaatgaatcagtattaaaacatcaaaaaaagaaataaagtaaattaaataaaaatacttttaaaaattttattttgttagcattttaatttaattttaattttaaaatttaaaaaatctctttttatatttttggatacaatttatatattccttatattcttatttataatattgaatactgtataaagtgtatataagaatcgctcactgacttttttattaaattttaaataattataaataattatcattaaaatatttatactatatattatattaaatcaaaatattatcacactttttgatttttaatatcaatatatatatatatacatatatatttcaattattattattattttaatggtataaatttaaaaagaatgatctaaacggtgttaaataaaaaatttaaacttttaaccgcatatacataatataattattttaaccaatgaattttgaattaatataaataataattaataattttattaataaaaaatatatattattatttattatattatttattataagataaattaattggtttaccgaaaattattaaataaatataaatttttattttatctttaaataccatttatgtttaccaattttaattattattaaaaagtgtaaaaaaaaaaaaaaaatattcaactatttcttttcattataatggaaatttaattttaatttcaacatagtataaaaataatttccattattatatgaaattttttatacaaaaagtatcaatttttcaaaattttagaaaaaaaaaaattatatataaatacatgatttctttttttaaaaattcttttttaatttaattatttcaacatatgaatattatttaaatattttaattttatttaatataaaattttttttaaatttgtaaattgtatattaaaattttgtaaataataaataaaatatttttcataaacttatatatatatatatatatatataaattaaaattttataaattattgtgtaaataaacattaatatatatatatataatcaatatgaagacctttataatttttactgtagctgcacttgttgccaaaagttcagctgaatgtatatttagtagatatggttatccatgttgttctggtcaagaagttgtttatgtcgatactgaaggacaattaggtgtcaaagatggtcaatggggtattgaatttggtcactggtgtggtatttcttctaatgataccgccagtactgaaggtcaaaccaatggtccatccccaattgaaaatagtccagctccattaactgacactccaactaccaaaactgttccagatgctccagttactgaaaatggaccagcttcagtcgatgctccagctccaatggatgctccaatgaatgctccaattgatgttccatctccaatggacgctccagctgatattccagctccatctactgatgctccatctactgatgctccatctactgatgctccaactactgatactccaaccactaaaactattccaggtgctccagtaactgataatggtccagctccacttgatgctccagctgatattccagctccaatggacaatggtccagctccacttgatgctccagctgatattccagctccaatggacaatggtccagctccagtaactgatgctccagtaactgatgctccaactactgatgctccaactactgatgctccaactactgatgctccaactactgatgctccaactactgatgctccaactactgatgctccaaatactgatgctccaaatactgatgctccaaatactgatgctccaaatactgatgctccaaatactgatgctccaaatactgatgctccaaatactgatgctccaaatactgatgctccaactactgatgctccaactactgatgctccaactactgatgctccaaatactgatgctccaaatactgatgctccaaccactaaaactattccaggtactccagtaactgataatggtccagctccaattgatgctcctgctgatattccagctccaatggacaatggtccagctccagtaactgatgctccaaccactaaaactattccaggtgctccagtaactgataatgctccaattaccgatactccaaccactaaaacaattactgacgctccggtcactggcgatgctccagttactgacactccaaccactaaaactattggtgatgctaacaccggtggtgacgtggctccaagtggtgaacaatacactcattctggaaatcctttcgctggtcatgaattcttcattaatccatattacactgctgaagtagatcaagctatcgctaatatgtctgattcttcactcatcgctatggctgaaaagatgaaggaatattcaaatgctatttggttagataccattaagaatatgaatgattggttagaaactaantnnncaaatgctatttggttagataccattaagaatatgaatgattggttagaaactaatttaannnnnnnnnnnnnnnnnnnnnnnnnnnnnnnnnnnnnnnnnnnnnnnnnnnnnnnnnnnnnnnnnnnnnnnnnnnnnnnnnnnnnnnnnnnnnnnnnnnnnnnnnnnnnnnnnnnnnnnnnnnnnnnnnnnnnnnnnnnnnnnn

SEQ ID NO: 1648 - DNA, 4000 bp, Escherichia coli
  misc_feature (100)..(100): n is a, c, g, or t
  misc_feature (184)..(184): n is a, c, g, or t
  misc_feature (262)..(262): n is a, c, g, or t
  misc_feature (1623)..(1623): n is a, c, g, or t
  misc_feature (1664)..(1664): n is a, c, g, or t
  misc_feature (1986)..(1986): n is a, c, g, or t
  misc_feature (2892)..(2892): n is a, c, g, or t
  misc_feature (3272)..(3272): n is a, c, g, or t
  misc_feature (3495)..(3495): n is a, c, g, or t
aataatggctttacaaaaaggatacaattcatttgtaactataacagaagcagaaagttatttctatgatagacttaaccaatctgcatgggatagtgcnacagatgaaactgttgaacgagctttagtaacagccacaggaattctcgataacttggattggggtggaacggctgtgcctacngccctttatcctttatcgtggcctagagatattacttattgggatacaaaatctggtgggtatgaaactttagaagangatagatcaacaacaagttatggaacttttcctgaagatatcaaaaaagctacctatgagttagcattacacttgattaaaaatatgagcacaatagaagatcaatcatcaggttcgcctagattgaaagatttaaaagttggctctatttctttaacatttgatttaggatctggaattagtaattttaacgaattacctgaccatattcgaaatataattgttaaattcgataatcctgctagttctgcaactaatagaggagttaaagttagtggaggtgcttaatgagttactcaaaactaattaaaaataatgtaaaaatggcatttaatgtcataggtgatattggtgaagatatagtgtttacaaataaaactgtaagtaattataactttactacacaatctgttgatactgctactgatacttcttttactgcgaaagcggtagttgaaaatcaattcagaactaacgatgatacacctagactagaatgtaatttaatgtttgattcagattatttagattctaagaaaattgataattacgacactgttgtatttagaggtaaaacttggaaaataaataaatttgaagataataattatgttattactttaactgttggaagggaatcttaatggctacaatatcacaaatgttgacagctgttgaaggtttgtttgcttccaccgcttggacatctaataacatcaaagcatttcctgcgaattatcaaggggaaattaatgctgaggaatggatacgggtttccgtattaccattttcttcagaattagcttatcaagatgtaatagcaaacggtcaaattgtatgtaatatatttgttccagctggagcaggtatgaaaagagcatatcaaattgctgatttactaaaaacattattagatcaagaagtaatctctggatatctacaaacaactaatagctttataacaaatattggaattgacccaaaagacgctggtttatataatgtagactatacggtcaatttcaaatcaatttaaccaaaaataatataaaggaagaaaacaaaaatggctctaatttcaaatataggtgctggtattttcactaaactaaaatacaaagctgatagtaactatactttaccaacttcagattctgaacatcaaaccttcattggtgctggtggtgattttgaaagttcggtagatgttactaacatcagagaatttccttcatttggtaaacctgctaacattgttaacgtacctagttacggacaatctgtaagtagccaaatacaaggacaatctgatgctccaacactagaatttagtttgaattatgtaccaagtgtacatgatncaattcaagctttagttcaagatggattaacatatgtattncagttggatgtaaaaaattcagctactggtgcaaatgctgcattttacgtaaaaggacaaatagcttcttttgaagtatcgccaaatttgactgattcaaatcaggcaactttgactttaagtacttcaactgactatactggtccgtttgctgacgcataataaaatatatattaggctgggtttaattacccagcttaatcaaattgtataggataaaatcatggataataaaccatttaataaatattatgtattaagaataacttctttacacataaaaaaatctgtagatacatcaataagaaaaacttatgatagnctgcaggacgtagataataaagtcgaggtctttgaaacattagatattttacataaaattagaaaaatgatggaagactttgaatcgaataataaacatttatatataaaacccttagaggaaattaaaaatgaaacacataaagataatagagataacgaagaaagtaccgttcctggatcaggaagtggagataaaacaactaacagttagaggtataaaggatttacaaaaaacattagatgtaaataaaaccgatgatgttgctggtataaaaactttaagtgctatatttaaacaaactgttgtaggtgctaatgaaatggaagattcagattttgaaaactttccgattaaagcattaactgaactatcacaagaaattcttgtatataatggtttagctgcatcagatgataaaggtggtgaattggggaagaagagctagcagaatatgaattggctcatcaattaggtgttacattagatcatatttataatatgtccagcaaagaatatatgggttggattaaatattttgaaacaagaccgtacggttggagagaagatcatagatctgctatattggctcaaacaacttaccaaggtactaaaccacttaaggtaaaagaattatttccatcattaaatatgttttcaaaaagcgaagaacaaaaagatattaaattagaagctggctttaatgaattaaaaaagatagctaaaagaaataatataacttttatggaaaataaaaaatctgaaaaatgatagtatgggcggtgtaaactgcccacttgaaaggtaattatgagagacacgaagaaaataactgcatatgcccttatcaataaaaagagaattaaagaacaagaattatttaaaaaccttaaaaaagaagtgaanactggtgccaatggtacacaaggttacattattaaaaagggtataaacaagggcaagaaaatataatggcaataactactataggcctaagttcggcctctaagaatttagctaaagatattgataaggcaattgaacaagaatttagagcaagagcattaaaagcttttgctgacgtaaaattaacaactccagttgatacaggacaggctagaaatagctggtacattggatacactgaaacatactataatcaaaaaacacctatatcatcaaacattaatatattggttcctaaagataaacctgaaaaaattattgttacaaatggtacaacatatatagagttccttaataatggacattctcagcaagcaccnactaaatttatagaggctgcttttagaagacattttgatacagttagtattgaagtaactaacggataaaggaaacatggctgtaaaattagacataattgctaatgtaaagggacagagcgaaataggtaaattacaatctggtttaaataaactaggtacaaatgctactatagcttcaaaaagattaaaaggtttagaagtagccgctgcaagatcaagntctacttttgctgcacttgggacaactttaaaagttggtgttgctgcatcattagctgctgtaacttttggtattggtaaatttgttaaagacacatttgctgcaggtagacttactgaatcacttcaagtaagatttaaactattattcaattcaacaacagagggtgcaaaagcatttgaggaaatgaataagtttgctagtaaagtacctttctcactagaagcgattgctgcaggatctggtaacctagccgttatatctaaagatgctggagaattatctaaaatattagaagtaactggtaacgttgctgcagctacaggactagattttagacaaactgctgaacaaattcaaagagcatttgctggtggtattgctgccgctgatgtattcagagaaagaggcgttagagcaatgttaggtttcgaagctggtgctaaagtatcaattgaagaaactagaaagaaattttttgaagtatttgctaatggtggtcaat

SEQ ID NO: 1649 - DNA, 4000 bp, Escherichia coli
  misc_feature (1957)..(1957): n is a, c, g, or t
  misc_feature (1969)..(1969): n is a, c, g, or t
  misc_feature (1986)..(1987): n is a, c, g, or t
gtttctaccaaaccattttttgaatagtcatgtcctaattgccaaaacataatacctcccaacttatgtgtaattacataattcgattttgcttttatggattgtttgtcatcaaaagtggcatagcttttttccgttgcattataggcataaggggcttgcgcctcattgtcccaataaaacttatatccagtattttcagaaatacgattctgaaactcattatagccaatgaagtgtttaaatttccccttttgatataaaccattattttgatcaattaccccctcccaagttctggcataaaatgccgcacctataattaatttttttgcaggcacacctaatgataataaatattgaatacaattatcggccgactctttttgcttaatagtactaaataaagcagaatgatgtccagtggtggttgcatatccactaaccaaatcataggtcatcaaattaacataattcacatagggcattatatcgctccaatctactgcatcatttgcaaatttttgaaaacctcccgcagcaaaagtgatggtcatctttttacccaattcctttcgcaaagcttttactagttcagtaaaattgggtttgtcctcaggtgtaaacttatgattcggaaatcctgcaatagcggggtattcccagtctaagtcaattccgtctgcaccaaaatagtccgtcaaggatttaacagattttgcaaaattaatacgtccttctgctgtgctaaatacgtctgaacaaggctcacatcctccccatccacccaaagacaataatacttttaaatccttgttttgatatttcattgataccattttttgaataatggcggtatcttttgcccctcttaattttaattggtcgccttgcaagtgtccaaaacaataaataatatgtgtgaaattgcgtgcatcaaatgaatctagtttttctatgcttcctgcatagtaagcaattacggctttcttttgtgcaatacttgataaagataaaaataataatattagcaagcctataaaaaagaaattctttttcataaaatagtataatttaatgattttatttaataaagatagctaagttattgcttagtttaaaaattatcctattgcttttatcaaaaaatatttaaccatggtagtttacctttttgagtatttgactataaagaaattgaagggtacggattaaaagatgtaattcatctgtcgaaagaaagaaatatagtagtttcaactatccaatcatttattattaattggtttattcttttttttataactttaaaaataaaatcatgaaaaaactgtggattatttgtcttttattgttctcttgttccaatagtgaaaaaattaatgataaaatttacgagggaaatcctgctggatttaaggatattggttttctaaccattaccaacgaaaatactaatgggggttctcaagttgcttatttgagtaaaggacttcaaatgaatggagtggcctactgcttttgtcagtcgagttgtactagagaaggtaaagctgttttttcattgcagtataatgaaggcaccaattttttgagatataaattgggtccatcagatgagtatatttatttcgatacttccaattggtgtattaaatacgaatgatgttatcatatgctttatttggatacaagataagaaaacaagacgtgcttaacgctgatgtaaccaatgctcctgtttcgtcatatcattaagtgctgcccaccccttaccaaattcattttgacttaataagcgcatctataggttgtttgtaaacccagcgtaatgcaattgatgcttatctgaaaataatatatagacagtataggtcataaaaaaggtctcattgctgagacctttgtagcgagaccgggatttgaacccgggacctcagggttatgaagatttttnaagaaaatgaangcgttgatttgtaaggnnttatgttttgacaaaaccgaaatcaaccgatttcagtcgaattcagggggtgttttcctcacgcagtagtgtcagctaggtgttttcttagtttttgcttaagtttaactatcgtattactttttaaacatttattgaaatagtaccacaatgattaaatcatttttaagtgtctttatctcaattgtttgttcaacaattgtgcatgcacaaacaatagatcaacttattaaaaaatttgacaaatcaattgatagccttcataccataaatgaattcaatggaaatattcttcttgtaaaaaatggtataaggctttatgaaaaaagtattgggtttacaaatagcaaagccaatcaaagactaaactcatcatccgcattcaatcttgcatctatttcaaaaacattcacatcttcattgatattgatgtatgtccaagaagggaaattgaaaatagatgatcaagtacattcctatcttcccagtttcccatacaaagacatcactattaggcatttattgaatcatacgcatggaatgattgaatattttgattggattaatgacacacttaaaatcaatgataccattggaaatgatcaattattagtccttttatcaaaatataaacccgctttaaattcagtgccaggtgaaaaattcaactattgtaatacaggatatgctgtattatctaaagtgcttgaaacaatcagcggtgtgccttatgctgcattgttaaaatctaaaatcacaaagccgctgaaacttgaaaacacctacgtgcaaactgtgaagatgtctaattcaccaaaaaacagggtttatggaatgcaatataaagaaggtcgttggaatacatatgaccttaccacactagatgaagttgttggtgacggaaatatttattcgaccgtgtatgatttacaaaaatgggatcaagcactaagggatggcaaagtacttaagcctgaaattttaaatgaagcttatacaccttcagttttgatagaaaaaccaaaaatggtgtatggtcttggctggatcatcaatgagccaggaaaaaaagtttcccattcaggaagttggaacgggtttaaaaataatatggttcgtgatttacaaaatggatacacactaatttcattgagtaatgggacatccggaataacttcttacaaacttcttgatcaatttgaaaaagcactcagcaatttgaaacaataatttaaaagtcatttttaaaatataaacttatatgaaaaaaacaattttatttttaatgctattgccattgctatccttggcccagcaatttacctctgagccagtagaaaatggtgttcgaataaaattcaattctcgtattatgggagaggaaagaacaatctgggtaagggttccagcctcctataatgatgtatcaagttcgaatcaaaactatcctgttgtatatgtattagatggcaagtcggcattttttccagtcactggagttataagttttatgagtgagaaagaccatgtgaattatcaaattcctgaaatgattattgtaggtgtggatactgaaaatagatttcgtgacctaacacctaatgcatcaacaagacaacctaatggagaagaagcaaaaacaccagaacaaaaactgatgatgcaaggtagtgggggtggtgagcaattcttaaaattcttgaaggaagaagtattcacatatattgaaaagcaatacagaacaaacccatttagaatttatattggacattctcttggaggtttaacagccacatatacatttttaaaacatccggaattgttcaatgcaacaatatcaattgaccctagtttatggtgggatggcgcaaaatatgtcaacgaggcgccagcattactaaaaaacttacctgctgataagatgcgcaagtattatgtaagtgtgattgattctataagttacggaggacgtcttcaatttcatacaaatgctatatttaatgttggtaaagc

SEQ ID NO: 1650 - DNA, 4000 bp, Escherichia coli
  misc_feature (396)..(396): n is a, c, g, or t
  misc_feature (499)..(499): n is a, c, g, or t
  misc_feature (505)..(505): n is a, c, g, or t
  misc_feature (571)..(571): n is a, c, g, or t
  misc_feature (697)..(697): n is a, c, g, or t
  misc_feature (976)..(976): n is a, c, g, or t
  misc_feature (988)..(988): n is a, c, g, or t
  misc_feature (991)..(991): n is a, c, g, or t
  misc_feature (996)..(997): n is a, c, g, or t
  misc_feature (1023)..(1023): n is a, c, g, or t
  misc_feature (1025)..(1025): n is a, c, g, or t
  misc_feature (1035)..(1035): n is a, c, g, or t
  misc_feature (1042)..(1042): n is a, c, g, or t
  misc_feature (1162)..(1162): n is a, c, g, or t
  misc_feature (1178)..(1178): n is a, c, g, or t
  misc_feature (1211)..(1211): n is a, c, g, or t
  misc_feature (1241)..(1241): n is a, c, g, or t
  misc_feature (1571)..(1571): n is a, c, g, or t
  misc_feature (1640)..(1640): n is a, c, g, or t
  misc_feature (2704)..(2704): n is a, c, g, or t
  misc_feature (3363)..(3363): n is a, c, g, or t
  misc_feature (3385)..(3385): n is a, c, g, or t
  misc_feature (3388)..(3388): n is a, c, g, or t
  misc_feature (3394)..(3394): n is a, c, g, or t
  misc_feature (3403)..(3403): n is a, c, g, or t
  misc_feature (3414)..(3415): n is a, c, g, or t
  misc_feature (3421)..(3421): n is a, c, g, or t
  misc_feature (3613)..(3613): n is a, c, g, or t
  misc_feature (3732)..(3732): n is a, c, g, or t
ggaaagagtccggaagcaacacaagactgcgttgcttccgaactagaaattgaaatggaattacatagcattccagatagagtgagtccatgcgcctttaggctttttggagatcacaggatcggaatcagatgacatcagaacatcgactgtgcgcctgtaatccgctggaatcaggtaaccaatgccctggggctgattgccaaccaacttgtttatttcacgcatcatccgacgctgatgtttttctgtctgtgcaccggtatcgtcattttccaggacaatatctgctgcttcatcaggatgatctgctgcatacttccaacctttgattgaagctttgaggaagcgggccattttactgacaaaagccttttttctcagatttttttccantacatacaaaccgtcttccaaggtagaaacaccttgatcttcatatttgtagaccactaattctgatggactgaggcctgcatcaacaatttgccagtattcnttgtangtcatggttgaaacacattctgcctgcttctgcagaattggatctacgttaaagccctgcttcaanacagtcactccgtttgaaccgccggtggttggaatacccaatttgctcatccagctcaggaaaggatattcgtttccatagaaccagactcccagcgttttcccacgaaaatcagccggtgatttnatcccgctgtctttgcggcaagtgagcatcattcctgactttttgaaaatttgggcaatgttcaccagagccacacctttttcacgtgatgccaaggcagcaggcatccaatcgatgattacatcggctcctcctcctgctataacctgaggcggcgcaatatccggtccacccggcttgatggtcacatccagcccttcggcttgatagtagcccttgtcctgggctacaaagtaacctccaaactgagcctgtgtaacccacttcaactgaatggtnactttatctgcngcntgtgnngaaaatgccaacccgactgtcagcancnccatcactanttttttnattatactcataattctctccattcgagattaaaattaagtcagctttttgtttgcaacaagcaagttagctgaccctgaaagatgggtgccatcctgtaaactgccgttccaaaaaagncagcaaggcatagaanaacgacccggacaatgctgccaccgcaatggangcccatacgacgtcaacattcattcgaccnatttcggtggaaatacgaaaccccattccgacaatcggtgtaccgaagaactccgccactatggcaccaataagcgccaaagtagagttgatcttcaatgcgttaaaaataaaaggcagtgcgttcggaagacgtaccttaagaagcatctgccagtagtctgctgcataagagtgcattaagtcaagctccattcgatccgtggactttaatcctgtaagagtattcaccagcatcgggaaaaaggtcatcataaccacaaccgctgccttggactgccagtcaaacccaaaccacataaccatgattggagctaccccaacgatgggnagagcactcgccagattccccagtggaagcaggccccgctgtaaaaaaggaactttatcaaccaaaacngcaaccacaattccggagacacaacccatgaaaaaaccggctagcactgctttcaaaaatgtttgctgaaaatcagcccagagcatttccagtgagtttgcaaaagcaactccgatcaaggacggtgccggcagcaaaacctgtggtacctcgaaacctatcgtcaacatttcccacaaataaagcagcatccctccaaataataatggaacaagtaaattgatgacaattccagtttttttattgagttgggtttccaccctcgaccagaatcccattacctcccacatcagacccgccagcgtcacaacatacagccaaatgccccaggaagttgtacccgattctgcagaatgtacactgtttaaggttgccatacatccggatgcaaccacgagagttatcacaattttacccggcatcagcacggttacccctttgcgaaaaagagctgctgcagctccgatcagtggcatcagggcaaacagaaaagtgttaactccaaacgacatccagtccctggaaaacagaaactggattggaaaacagattataaataaccagtagaaaattccggaaattttcatgcctgtacacccattcttttttgaaccctgttttccatgactgtcatcagataaacaaatgatccagcaataatcgaggcgacaaacagtgcactccaaatttgtactgtctgtccataatatgaacctgtcaataaacgggcacctaaaccggcccttgctccagccggtaattctcccactatcgctcctaccaaactgatggctatagaaaccttgaaacttgcaaacagaaaaggagtcgaggtgggccagcgtaatttataaaatgtttgagatttagatgcattgtaagttttcatcaaatccagatgcattggatccggtgagcgcagacccttgaccataccgattgcaattgggaaaaaacagaggtatgcagaaatgattgctttaggtaaaagacctgttacaccaatggctcccaagacaactataaccatcggtgcaattgccaaaatcggtattgtctgtgangcaattatccagggtaaaacacttttgttgagtgttgatacgtgcacaattcctactgccagcaaaatacctaaaactgcacccattgcaaaaccaaccagggttgacgaaattgtcacccatccatgataaaccaggctgcgcttggaacttattttgtaaccaaaaatcgacttcttcatgtcgagcataatctggtgcggtgccggcataaccggacgtttcatcgcccaggaatcttcaacaagtttggaaaaattccactcaattttttttcgatcatatttatctatcaaaacatctgaattgagataaactgctgctccataccaaatgacagtggtgaaggcaagcacggctgcaatcgaaaaaaaagatgaggtacgaagccaattcataacatctggtcaatcataactatgacctgcccgcaaaccttcccggatacggtgcgacagtgcaaggaattccggagtgtcccgcatatctaaagttcgtttttctggaagggtgctttcgattatgtcgatgatttttccgggacgcggtgacataaccacaatttttgttgaaaggtatgctgcttcaggaatggagtgagtaacaaagactactgttttctgggtttcttcccaaagtcggtgaaaatgttcgtttanttggtcacggacaatttcatcnagngcaccnaacggttcntccatcaacannaaatcnggattaaatgtaagggcacgggcgatagaaacgcgttgctgcatgcctccggaaagctgccaggggaactttttttcaaaaccggaaagatcgaccatttccaaaacttctttggaacgtcgggcctgttccgttttgtcgatgcccattatttccaaaggcagtttaaggttgccttcaacagtgcgccangggtaaagagcaggtgcctgaaaaacataaccgtatgcacgctgcaagcgggcctcttccggagtcatctcattcacctggatgtcgcctccggtaggtttttccaggtctgcaatcanacgtaacagcgtcgtttttccacaaccggaaggcccaatcagtgaaataaaatcgcctttattaatttccaaatcaatttcagaaagagcgtggaccgggccgtctgaagtctggaaaaccaagtcaactttacgagcctctacaacccggacactttctttcattacgatgaacgatccacggaagttggagcagtagcagagctccgtttttcaactgcagcataatatggggcaaaacatggacgatccacataacggcctacac

SEQ ID NO: 1651 - DNA, 4000 bp, Escherichia coli
  misc_feature (57)..(57): n is a, c, g, or t
  misc_feature (94)..(94): n is a, c, g, or t
  misc_feature (2266)..(2266): n is a, c, g, or t
  misc_feature (2460)..(2460): n is a, c, g, or t
  misc_feature (3843)..(3843): n is a, c, g, or t
catgactgaactctggcgcccctccccggcccgcatcgcggacgcgaacctcacccncttcatgcgctgcctgaaggcgcgccgcggcacgctnctgcgcgactacgctgagctgtacgcgtggtcgctggcgcagccgcagcagttctgggccgaactcgcgcactttgcagacgtacgggccgactggggcgaggggccggtgctggagaatccgcagcagatgcccggggcacgcttcttccctaacgcgcgccttaacttcgcggccaacctgctcaagttcgacgacgagcagccggcgctggtgtttcgcaacgagcgcggcgcgcgtcgcgtcctgtcataccgtgaactgcgcctgcaagtggcgcgcatcgccgacgggctacgcgccgcaggggtgacggatggggatcgggtcgcggccttcatgccgaatctgcccgagaccgccgtcgcgatgctggccacggccagcctgggggcaatctggtcctcctgctccccggattttggtgtccatggggtactcgaccgtttcggtcagatcgccccgaaggtgctctttaccgccgacggttacttctatggcggcaagaagctcgactcactggaacccatggccgccgtgctcgccgagcttcccggcgtcagccgcgtcgtcgtggtgccctacgtcgaggcggcgccgcaacttgagcggctcggggcggcaagcgagcgcgcctgtctgtgggaagactggggcgtgcgtggccggccgctgtccttcgcgcagctgccgttcaaccatccgctctacatcttgtattcctccggcaccaccggggtgccgaagtgcatcgtgcacggggccggcggcaccctgctgcagcatcagaaagagcacctgctgcacgtggacctgaagcgcagcgatcggctgttctacttcaccacgtgcggctggatgatgtggaactggctcatgagcggtcttgcgaccggcgcgacgctggtgctctacgacggcagcccctttcagcccgaggcgggcgcgctgtgggaaatggcaacccaggagcgcatcaccgtcttcggcaccagcgcgaagtatctctcggcgctggagaagcgcgattacgcgccgggcagcgttgcggatctgtcggccctgcgcacggtgctgtccaccggctccccccttctgcccgagggtttcgactacgtctaccgctcggtgaaggccgacgtccagctcgcttcgatttccggcggcaccgacatcgtctcctgcttcgccctcggctgcccgacgcggcccgtctaccgcggcgagatccagtgccgcgggctgggcatgagcgtcgatattttcgatgacgccggggaagcgctgcgcgggcagcgcggcgagctggtctgcacggcaccctttccctcgatgccggtcggattctggaacgatcctgacggcgctaagtaccgcgccgcttatttcgagcgctttccgggcgtctggcaccacggggactacgccgcgatcaccgagcatgacggcgtcgtgatctacggccgctcggatgcggttctgaatccgggcggggtgcgcatcggcaccgcggaaatctacgcggcggtggagagcctgccgcaggtggccgaagcgctcgccgtcggtcaggaatggcagggtgatgtgcgcgtggtgctgttcgtgcgcctgcagccgggcgtcgaactcgatgaggcgctgaagcgcaccatccgcgaaaccatccgcactcagaccacggcgcggcacgtgcccgcgcgcgtgatcgccgtccccgacatcccccgcacgctgtccgggaaactcaccgaactggcggtgcgcaacgtcatccatggactgccggtcaaaaacctcgatgccctcgccaaccccgctgcgctcgagcactttcgcgatctgcctgagctgaagatctagcgcccgtgaatgactcagccccgggtgccacccgcgccgcggacgaagacctgctgcagcgttattaccgcgaggtccgggagcggcatttcgtagccgacccggcgcaaatcgccgccgtcaaccgcctcatggatcttaaggcgcgcctgctcgcccgtgagcgcccggcggggctcgcgggtcgctggctgcgggccctgcggccggcccgggcgctcccaccggtgcgcggactgtatctgtggggcggcgtcgggcgcggcaagacctggctcatggatcacttctacgccgacctgcccttcntcgagcgacggcgctgccactttcaccgcttcatgcatgacgtgcacgcacaactcgccacgctcaaggggcggcgcagcccgctgcagcacgtcgcggctggcatcgcccgcgacacgcgggtgctgtgcttcgatgagctgttcgtcaccgacatcgccgacgccatgatcctcggtggcctgttcgcgggnctgttccaggcgggcgtgacgctggtgacgacctcgaacgtcgcgccgcaggatctttacaaggacgggctgcagcgcgagcgcttcctgccggcgatcaccttgctcggggagcatctggaggtgctgcaggtcgccgctgccaccgactatcgcctgcgccagctcacccaggcgggcacctacctcatggcgcaggccgcggacagcggtgcgcgtctggaggcactgttccgcgagctcagcgacgcgggcacacaggccggcggcaccatccagattgaaggccgtccgatccccgtggtgcgcgcagctcacggcgcggtgtggttcgatttccgcgcgctgtgcgccggcccccgcagcccggaggactacattgagatcgcgcgcgagtaccagtcggtaatcgtctccgacgtgccggtcttcgacgcggcgctggaggatgaggcgcggcgcttcattgccttggtggatgagctctacgaccgcaacgtgaatctcgtagtctccgcggcggcggctccggcccagctctacgccggcagccggctgcacgcgctcttcgaacgcaccgccagccgcctcgtcgagatgcagagcgcggcctacctggcacgcgaacaccgtgcctaaggtgcgtaaggtgggccccctcagatcaccccgcgccggatttgatcctgctcgatcgattcgaacagggcgcggaagttgccctcgccgaagccctcattgcccttgcgctggatgatctcgaagaagatcgggccgatgacgttctgcgtgaagatctgcagcaacacgccctcgcccttctcaggattgccgtcgatgagaatgcgccgctggcgcagctcctcgagcgcttcgtggtggcccgggacgcgcgccgccacgccctcgtagtaggtgtcgggggagtcctggaacgcgaccccctgcccgcgcagcacgtccacggtgcggtagatgtctgcgctcgcgagcgcgatgtgctggatgccctcgccgtgatactcgcgcaggtattcctcgatctgactcttgtcgtcctgggactcgttgatgggaatgcggatcttgccgcaggggctcgtcatcgcgcgcgaaaacagcccggtgtgcttgccttcgatgtcgaagtagcggatttcacggaagttgaacagcttctcgtagaatcccgcccacacgtccatgcgtccgcgcccgacattgtgcgtcaggtgatcgatgagcgtgagcccggcgagcgcggcagactgcgtgccgccctccaccggacggaagtcaacgtcgtagatggatcggtccccgtacagatcgacgagatagatgagggagccgccgatgccttcgatgcaggggatgttcagntccatgggacccgcgctgctcggaccgggcttggcgccgagtgcgagtgcgcggctgtaggcacgcgcggagtcgtggacccggaatgccatggcgcaggccgacggaccgtgtgcgcgcgcgaaggcctgtgcaaaggattgcggttccgcgttga

SEQ ID NO: 1652 - DNA, 4000 bp, Escherichia coli
  misc_feature (2001)..(2001): n is a, c, g, or t
  misc_feature (2003)..(2003): n is a, c, g, or t
ctgaataaccctgagtttgatcgttacgacctatcgtcgctgcgctgttgcaccgtgggtggacagaccatgccgaagcctaaaatggaggaagtggaagcgcgctttggctgcccgttgatagagctgtgggggatgaccgagttagggggattaggcagtacttttgcctctaacgggccggtgaaacacggttctattggtgtggcgttgccttacacagaagcaaggatcgctcataccgaagatgctaaccaaacactaccgctgggcgaagtgggtgagctgatgatcaagggcgggattgtcatgcaaggctattacggtaatgagcaggcaacccgcgagacgattgagcccgacggttggttacataccggggacgtggcttctatggacgaagacggctgcatttttatcgttgatcgtaaaaaagacatgattctgacggccggctacaacgtgtatcccgctgagatcgagcgagtggttgcggggcatccagacgttgcgctggtggcagtggggagtatcccggacctcgaaaaaggggaattggccaaggcctatatcgtccctaaaacgggaacccagcccgatacagagaatgtcattgcctactgtcgcgagcatttagctgcctacaaagtacctcgtgcagtgcagtttgttgatgatttgccgaaaaccagcaccggcaaagtgatgcgccgcgagctgaaaaaattagataagtagcatcattgggagaaccagctatgaaaattgacagtgattttgtcatgacgattaatggtcaattcgtcacgacagagcaaactcagcctgtttacaaccctgctactcggtcggtctttgctcaggtgcctgatgcgtctcaaaaacagctcgatgagaccgttcagtcggcgcatattgcgctcaaaacatggggcacaaccgccgctaacgacagacaggcggcactcgagacttacgccgatttactggaagcgcatgccgatgcttttatgtcgttgttgacccgtgaacagggaaagcctcgagcgggggcagagtgggaagtactgggttccgttgcctggctgcgtgcagtggcatcacaaaggctgcccgacgaggtggttgaggacaccgatgatcgccgcgtggtgacgcggtttaccccagtcggcgtggtcggggcgatcgtgccgtggaattttccaatcttgctggcgatatggaagattgcaccggcattaatgtcgggcagtacgatgattctgaaaccctctccctacacaccgctgtgtaacttaaaattggtagaactggcacaacaggcctttccgcccggggtcatcagtgcgttgagcggcggtgatgacctgggtgtgtggatgacgacacatcctgatatcaataagattgccttcacagggtcgactgagacgggtcgacacgttatgaagtcggcctcggcaacgattaagcgggtcacgcttgagttaggggggaatgatcccgccatcgtgttgcccgatgtggatgctaaggccttggcaccgcaattattttgggcagcgtttcagaataatgcgcagttttgcaattcgaccaagcggctttacattcatgaggatgtgtacgacgaggtgcgggatgcgctggccgattttattacgcatcacgtcaaagtaggtgatggcgccgaagcggataccgatctcggtccgatccaaaactccatgcaatacggcaaagttcaggactactttgccgactgtcatgttaacggctataccttcgcactgggcggcgagattgatgagaaggcggcaggatggtttgtccccgtatcactggttgataaccccccagatgattcgcgcattgttcgtgaggagccgtttggtcccatcctcccgttgatgaagtggtctgacgaggccgatgtgattgctcgagctaacgatacgatttacggattgggagcctcagtctggggtaaagacctcncngcgatagagcgcattggtaagcagttagaggcggggacggtgtggctcaacgaggttcaccagtactcgccgtttcaggcctttggtgggcataaacaatccggactgggttgtgaaaactcattgcacgggctgatggaatataccaactggcaaacgatcacgatgaacaaagtcgcataggggggaagctcaggatgccccgagacggttcacgttgacactgtctatcacgctgggacgcgcctgttgcgatcgtaacgcttttgaggcgggatgccccgccgaatggggaggcgagcgaatcttcatcctgctgcctgcctgatcgaagcggttgttttcgtcggttatccggcatactgggggcagcagaagtgccgatgcgatgtgttccgacataaaggagcgtaggtggattacggagcagtcagtctcatacccacagccttggtattgctgttggctatttggagtcacagaacactggaatcggtgatctgcggtgccatcttggcgtttctaattatggatggctggcaatttgctgatcgtctggccgtcgtgaccacccaggtcctggccgacgaatcaaccgcctgggtactgctggtctgtggtctctatggcagcttcattgcgttgctggtgaagggtggtggcgcctatgcgtttggagaatggctggcccccaaactgcagggtaagcgcagcagcctgttggcgacctgggtactcggactggccatatttcttgacgactatctcaactcgttgaccgtgggcgccacaatgaaatcggtcactgatcgatttaaaacctcgcgagaaatgctggcgtatgtggtggattccacagctgcccccatgtgccttttgattcccatctccagttggggggtctactttgcagggttacttgagaaaaatggggtggccgagtcggggcagggtatcgcgctgtttgtggaatccattccttatatgttttatcccttgttggcgatcgtcgtggtcccactggtgatagtgggtgccataccactcatgggtgcaatgcggacggctgaagcgcgagcagaagagctgggtgatctgggtgtggtcgaagaccctttgttagcggttgaagcctcggaaaccgcaacgatgagtgtgttctttttgccaataggcgccttactgttctttacgatcatgccttcggtcgatttgctgcggggggtcatcctcggcattatcgttacgctgctgcagtacagtgtgctgcgcgttatgccaatgacgacattgcttgatacctgtgtagacggcgtaaaatcgatgcttccggtcttggcgatgttgctcgcgctatttgtttttgtggaagccaaccaggctatcggcttgaccgactatgtcattgcggggatcgaaccgtatctctcggcagcattgcttccggcactgatgtttatcgtgatatcgctcgtcgcctgcacgaccgggtcaaactggggggttatcgccattgcgatgcccgtggcttttccgttggcagaggccttcgatgtacctatgccgttgatgattggcgcgctgctgtcagcgagttgcctaggcagccatgcctgtttttactcagactccaccatcttgagtgcacagggagcgggctgtaagacccatgaccacgccatcacgcagttaccgtatgcgctcataggcgcagcgggtgcggcgactttatttatcgttgcgggtcttttagcttcctagtttgcacagggtgctgccctggcggtaaaaggtgcagcatgcctcatgtctggtcgcggtaagctgccgctacggcgtattttttgtgtccatgagcagttgttttgcggctttgtaatcggccttgccgttcggcgcgcgaggcacggcgggcacgatgaggagctctttgggcaccttgtaactggctagcagaccgcgcgtggcggttaagacatcgtcagcactaactgcgc

SEQ ID NO: 1653 - DNA, 4000 bp, Escherichia coli
  misc_feature (1949)..(1949): n is a, c, g, or t
aattccactttcagcacttatgcctgctccagaaaatacaacaattgttttcatttttcatagatataaaaaagccccgacattagcaatgccggggctttaatcttttacctctgaaagaagtgaattggtattatttgattacaacattttcagtgtatactcctgattctgttgaaattgtcaccaagtacgatcctgcagacaattccccaactgggaaagtaacattttgagatccagactcagtagccaaaactcttccttgaagatcaaggatagctacattataagtagacgcttcggcgttgaaactaatattcaatacgtcagacgctggattcgggaatattgaaacattttcaatgttgatgtttcctactcctgaagatgcatctgttctcatcgctgcgccacgctcaatgtctgaccatccactaccagcgtcccagttaaagataacattcccaaatgattttacttcaatcccaaatccaccttgaggatttgttcctgttccgtattgttgaccatcaccgtagctgtcgattaatttaacagaatagcaatccacaccattcggcaaggtatgagctgatgttattgttgtttgagcgtctgggccacctgcaccaaattgatcgtcagttccaggggtgtacggacctcctgaagcaacaacagttccagcagaagaaatgatttcccatgaagtttctccagggtagttgtctgtgaagaagtcaacgttaatactgtatcctgtagatgtggctgcaactacttcaaatgttcctgtacctgagttgtccgctgtgttgtccgcaacaccatttggattggacactgatacattaatcgtatttgttcccactataggattgaatgtgattggatttaaagtaatttgcgacgatgcacctggagcgattgaaccagtccagttcatcacctcagatgttccaccattgatatcgtaagtaattgttgccgatgtcattgtgtttgatccccaattggttattgtagtgcttggagaaattgtttgtgccgctgttccatcacaagattcaatatcagaagttgctgctgagctaaagattacctcatccgttgcagtgaatccagtcaattgtggattgattacttctcctgttaagatgtctccgtttgcttgatttccatcattgatgaacgcagcaatctcaaggtcagccaattcaagggcaacaccattgatgtctgtcggaagtgtttgcgtgtaggacataattgccgttgcaccagttgttgttgtgttgattgcatctccccatactggagtaataaaatctctaaacatgtgagaatggttgtaatttccattcggtaaaacagctgttgggttgtacgttgctccaccagtctgtggcccttcaacgttgttttgaagaagtgctacatacatgtaatttgttgaatttggagcatttgctgtgtagtagtattcaacgtcaacatttaagacacgcgtaacgatgtctactgttgcagagatgtgcatattcacctcagatgcctcagagataatttgaggtactttgtcagcgtcgttcgaacctgctggatgataggtttgcgaaccaccaatggttcttctgttaagcgtcgatgctggatagcctgatattgagaatagcgaggcgttatcgtctccatctgtcgtacggaagtctggatctccgccacttggtgctgcatatccaccggtatggatatttaatgcaacaacatctccagggtttgtagcgatagcttgatcaacagcaatgtgaccagttgggcaatagacacaataaattccagtccattcctcaataacggcatttctgttttctggtgttgtgcttacgttcacttgggtgtttccaatcatcggaaaagccaaagctccggcaaacaataatttngtaaagtttttcatgattttttgagtatgttagtttttagcctcgaaatttcttgttttttttttgaataaacaacaataacatcaaattcttttaatattgagatcatttttagtatttcatattgtgacagattttgtttagttggttgtttctactctttttggaacacgaaattatttcattcatttcctcacgctttttcgtacatttgttcgcttcaaaagaccctaaatggcgaaaattagaaaacaagatgcattggattatcattcttctgggaaaccaggtaagattgaggtagtccctacaaaaccatattcatctcaaagggatttgtccttggcatattctccaggagtggcagagccttgtctgagaatagcagagcacaaagaagacgtttacagatatacaagcaaaggaaatctggtagctgtcatttctaatggaacagcagtccttggattgggtgatattggtcccgaagcttccaaaccagtgatggaggggaaaggtttactattcaaaatctttgcagatattgatgtttttgacattgaattggatgcaacagatccagagttatttattcaaacagtgaaagcgatggccccaacatttggggggattaatcttgaagacataaaagcacctgaagcattcgaaatcgagcagcgattaaaagaggagcttgacataccaatcatgcatgatgatcagcatgggactgcaattatttcttctgcagccctgatcaatgcgcttgaattggcaaaaaagaaaattgagaaagttaaaattgtagtttcaggagcaggagcttcggcactttcttgtgcgaagttgtatcacatgctgggagcgaaggtggaaaatattttcatgtttgattccaaaggattgattcattcaggaagaacggaccttgacgcgaataagaagttttttgccaagcacaagcaatctgttccttttgaggacgcatttagaaaagcagatgtatttcttgggctctcaaaaggaggaattgtatcgaaagaaatgattcaaagaatggcaaaggatgcaattgtatttgctcttgccaacccggagcctgagatttcttacaaagacgcaatgtcggtgcgagaagacatcattatggcaacaggacgttctgatcatccaaaccaggtgaataatgttcttggctttccatttattttccgtggagcactcgatgttcgtgccaaatgtatcaatgaagaaatgaagcttgcagcagttaaggccatagcttccctggcaaaggaaacaattcctgaggaggtcattgaagcatatggagagaaaaacatttcttttgggcgtgatcaaattattccgaaaccattggacccaagactgatctattatgtggcccctgcagtggcaaaagcagcaatggattcaggtgtcgctcagcatccaattgaagactgggagtcctatgaaatggaacttaaaaaccgtcttgggttagacaataaattgatccgaaatattacagaaaaagcacagcgatctccgaaacgtgttgtcttcgctgaagcagacaatataaagattttaaaagcggctcaaactgcatgggaagaaggtgtggcagagcccatccttttagggaaagaaaaacgaattcaggaactgattgaagaatatgcgattgagattccaaatgtagaaattatcgatccgaaggcagatactgagaaagaaagacgtgaagccttcgggaatgccttttttgataaaagaatgcgcaaaggaatcacccattttgaagcaattcaaatcatgcgagaacgaaaccactttggctcaatgatggtagagttgggtgatgcggatgctatgatatcagggattacgcgtaactacagagatgttgtacgtcctgcaattcaaactgtcgggttacagaaggacatgaacagagtagctggtatgtatattttgaatacgaaacgcggcccgttattccttgcagatacaaccattaatttaaatccttcggcagaagatat

SEQ ID NO: 1654 - DNA, 4000 bp, Escherichia coli
  misc_feature (277)..(277): n is a, c, g, or t
  misc_feature (544)..(544): n is a, c, g, or t
  misc_feature (1210)..(1210): n is a, c, g, or t
  misc_feature (1281)..(1281): n is a, c, g, or t
  misc_feature (1982)..(1982): n is a, c, g, or t
  misc_feature (2038)..(2038): n is a, c, g, or t
  misc_feature (2187)..(2187): n is a, c, g, or t
  misc_feature (2432)..(2432): n is a, c, g, or t
  misc_feature (2917)..(2917): n is a, c, g, or t
  misc_feature (3329)..(3329): n is a, c, g, or t
  misc_feature (3413)..(3413): n is a, c, g, or t
  misc_feature (3511)..(3511): n is a, c, g, or t
  misc_feature (3662)..(3662): n is a, c, g, or t
  misc_feature (3979)..(3979): n is a, c, g, or t
ggtcgtcaggcccgcgagcgcggagatgccacgcagcgtgcccgtcttggcccgcggcaccccggccacggccgcggtgtcaggctggttgaagcgggtcgccaaggtgccggtcaggccggaggtcgggagctcggcgaggactcgccgcatccccgggtgtttccctccgagtccggtggccagcacgtgatcgacggtcgtgagcgggacgagttgaccaggtcccaggccgctggcgtcgtggatcgtcgtgcccgaggtgtcgattccggcnttggccagccccgcgagcacgaagggcccggtgttgccgtcggcggggacggtgccgccggaggcgacgatcgcctggcgggagaggttctcgaggatggcgttgtcactctcgtccatgccgtgacccagcacctcggcgatgggtgcggaggtgaccgagcccaggaccttggcatccttggccggagccggaccgggcggcaaagcggtggcctcgcggccgtgggccaccagcgcggccacgaatgcctcgaggctgtcgtcnaccgactcctgccggggcaccaggccgtgctgcgggcgattgtcggccagcccgatcatcgtgacccggcgcgtgtaaccggcgctcacatcggcggggttccacgaggacgggatcggtgggcccgcggcatacgaggcgtcgagacggacggtgagcggaccagcgggtgcggccgcagcgacctgagcggcgaggtcaccgagaccggcacggcccacgacggcggtcgggtccccgggcccggtcgccagcagggtgtcacccccggccacgagcacgacctcgccaggagcgcccgcaacaacggtggtcttcatcgtggactcggcgtcgaggacatcggtgatggccagcgccgaaaggatcttctgggtggaggcgatggtccgtgggcgctcggcgtcggtggacaccaggacctcgcccgacgtgatgtcccggaccacggctcccgcgccgccacccagggacgggtcggcgagcagagcgccgatggcggcagcggtcccttctctggtgggcgcggggccgagtgcggcgctgggctcgggcgaggtcgtcggcagtggggtgagcccggtcgggaccggctcggggagcgtgaggatgccggggacgaggtcattggcgtcggccacggcatacccgccaccggcgagcagngcgagggcgatgagacctccgacgaccttcttggcgtgtcccacggcacctccccacgacatcgcacccgncatgcgcgacacttggccagcagcctaggtgactcaaggaaagaggcagacgtggagttcgacgtcacgatcgagatccccaagggagctcgcaacaagtacgaagtcgatcatgagaccgggcggatccggctggaccggatgctcttcacgtcgatggcctacccgagcgactacggctatgtcgaggacagcctcggcgaggacggcgacccgctcgacgccctcgtgctcctcgacgagccgacctggccgggatgcctggtgcgtgcacgcccgatcggcatgttccacatgcgtgacgaggccggcggcgacgacaagatcctctgcatccccgccggggacccacgcaagagccacatcaaggaactcgaggacatcaacgagttcgatcggctcgagatccagcacttcttcgagacctacaaggacctcgagccgggcaagtccgtcgagggcgcccactggaccggtcgcgtcgaggccgaggagaccgtgcggcaggccgtgcaacgagccaaggacgcagggctgtcgacggcgcgctggcggaccccggagatgggcaacaaggccattgccgagttccagagcaaggtccggcacagcgaggccgagttgcaggcggcgatccagaaggccgtgcgcgagctggccacgaaggacaatccgctcagcgacgactgagaggccttctncgacaacgacaaaggtgccgcgccccttccccggggcacggcacctttgtcgttgncgtcggctcagtagcgtgcgacggtctggatgagatcacctgagtagtagatcgacgagatcttgacgaccgtgcggctgttgggggcgtggatcatctgcccgttgccgatgtagatgccgacgtggtggttcgtcgggccactgttnccgaagaagacgaggtcgccgggctgggcctgggacagggggatcttcgtgccgttgttgtactgccactggcttccgtgcgccatgtagacgccgatctgcttgtaggccatgagggtgaggccggagcagtcatagccgaccggcccctcgccgccccagatgtagggcttgccgagttgcgcgtaggcgtagtcgagcaccttctgcttgttgccgctcaccgccggcttggtcggtgcggntggcgtcgtcggtgcggccggcgtcgtcggtgccgtcggcgcggtaggggtggccggtgtcgtcggtgccgtcgggctggtgggagccggggcgttcttggctgcttcagcagctgctgcggccgccgcggctgccgcagcatcgcgcgccgcctgatcggcggccgccttggccgctgcttcccgagcagcggcttcgcgtgctgcagcctgcttggccgcggcgtccgcggccgcctgatcagcggccgccttcgcggccgcttcggcagcggcccgcgcggcggcggcctggcgagccgcctcctcggccgcggcctggcgcgcaaggccgtcctggcgagcctgctcgacctccaccgaggtctggcgcagcgtggccagggtgctgaggcgcgcctgctgctcgccggcgatccggtcagcatccgcttgggcggacgtcgccgcggcctcggccgcaactcgggcggcgcctgccttgncggtggctgcctcacgctgttggcgcgcgacgtcggcggctcggcgatcctccgcggcggtgttggccgtgcgagaggctcggtcgaggtcctgccggcgagtggcgccgatcgcctcgagcgccgccgcacgatccgcaagttgctgagggccactgacctcgagatacgcgcccagcgagtccaggccgccttgcgactgatacatctgcgcggcatacgcacggacgaccttcgcgctggttgccgcctcagcggccgacccggacgcccggcgctcgctttccgccgccttcgcggtggcgtcctcgagagcgagccgggccgagttgtaggcctcggccgccactgcggccgccttgtcgagatcggccaggcgaacgttggccgcggcataggccgactcgatggncgccacggaggcggctgccgcaccggccgcggccttggctgcgtcgacctgctgctgagtgggtgtcccggggtccaggggcancgcaacggcaggtgtcgcgagagccagggcgagcgcgcccacggccagcgggcggaggaccttgaggctggatcgggtcgtcatgggttcacgctgangtggacgtggtcatagtggttctcggtgatggagccacggtcggccatccaacgccactggtcgggaccgttgcccgggaaccagatccgctgcttccagatgatgtatttgatgttgaactgccgtgcattcgcctgagcgaaggcggcnaccgcatcaccctcggcgaaggacttggtcatgacgtcgaccgcgttacccgcgccgtgatcgccccagtcgccggcccggtagccgccgatgttggtgatgccgaaccgggtgcggaccgcggagtagatcgcattggcattggttcccaggcgcgcttgtcggtatgccgtggtgctgtatccgccgccgctggccggggtcgtggcgactggctttggagccgtggccgcaggggctgcggaggttgccggcgtggtcggggtggccggcttggtgaccggctggggtgcctggctggcagcggatgcggccgncttggcggcctgggctgcatc

SEQ ID NO: 1655 - DNA, 4000 bp, Escherichia coli
  misc_feature (609)..(609): n is a, c, g, or t
  misc_feature (637)..(637): n is a, c, g, or t
  misc_feature (1122)..(1122): n is a, c, g, or t
  misc_feature (1985)..(1985): n is a, c, g, or t
  misc_feature (1992)..(1992): n is a, c, g, or t
  misc_feature (2559)..(2559): n is a, c, g, or t
  misc_feature (2821)..(2821): n is a, c, g, or t
  misc_feature (3049)..(3049): n is a, c, g, or t
  misc_feature (3840)..(3840): n is a, c, g, or t
tggctcgcgaattttcaacatacgctacaacggcgatgagcgctaccagcgcaggccctaccgtattcaattccgttacaacagctcgctgaccgcggccgtgcgttgggataaaaagcaccgtggtttcatctgcgatcacctcgcgccttcgcaagaaggtttagaagaacgctggtttgcctacggccctgacttttcgtacgatcgcatctactggtctaatggcaagtggcaattggacgaagcctatccactggtccaaaacttagaggtggcacctaccaataacaatgtgcctaccacactggacccccgaaaataaagcatacaaaaaagccccgcgttgcggggcttttttatatctagtctacaccgcgcgctgcgcggccgagtgtgtacgtttaatgatttaacatcacaggcataacgagcatgagtaagtcttcaccatcgtccatgccgtctgccggtattaaaaggcccgcacggtttggcgcactcatttccatgcgtacgttatcactaccaagattgcttaacatctcaagcaaaaagcgcgaattaaaaccaatctccatatcatcgccttggtagtcgcaagaaatncgttcgtgtgctttattgctaaaatctngatcttcagcacttactgaaatctctgcaccggccagtttcaaacgaatctgatgcgtcgttttattggagaaaatagcgacacgtttcactgaagaggagaatgcgctgcgatcaataagcatcacatttgggttcgactgtggaataaccgcctcatagttcgggtattttccatcgatcaaacgacaaaccaaaacaacattatcaaatgtaaaatgggcgttggtattgttgtacactacctctacttctgaactgtcatagctcaaggaaccgcgaagcatgttcaacggctttttaggcataatgaattcagcagtatccgcagcgcctaaatccgtcctgcggtaacgcaccaacttatgtgcatccgtagcgacgaaggtcagcgaattagattcaaattggaaaaacaccccgctcataactggacgaagctcatcgttaccggtagcgaataatgtttttgtaattcccgtcacnaatgcttctgcaggcaaggtcgcctttgaagaatcttctaactctgggaacttaggaaactcttcgccgtcaatgtaagccaacgaatacttcccgtaatctgaagcgagttcaatggagtgcgcgccttcatcgaaagtaaaggtcaacggctgctctggaaaggtctttaaggtatctaaaagcgtcttggccggaacggcagcagtaccgtggtcttggctttctacttctaaattaacgctcatcatagtctccaaatctgaagcgctgaccgtcaactcaccttgctttaattcaaacaagaaattgtccaatatgggtaaggtattgttgctctgaataatgcctccaatcaattggagttgcttcaagagtttcgaactagatactataaacttcatacgcgttgaatttaatgctcgtaagacaaatataatcgggcaggcgcctttgtaacggcacgcggcccaattttcttatacacaattgttaataatcaaatgcgctgtagatcactgtgcttcagtgaaatcccagcgtaatttcaataagtttctccagccatagcgttgtattaatgccattcgtccgtccggcaattcagcatagaatcgatccggatcccaaacgtgcactgtaccgtcggccgactgctgttgaccttctggctttttataaaacgcgcgggtgcgcaagtggtctccgttggtcgtagtaacgaggagctcgaacgcgggtgtggaggcaaagatactgtccttcttttcccatatgttgtcagacgcaataatggcgccctcgtacttcaaggtctcaatgcttttgaccaccgtgaacagtgccaatggatcgctgaccgntataggntcgtgcgctgctcccaccatggaccaatgctctggtgcggttgccggctcaagtaacgggccggttaaatctgctggattttgacgcgtgatcatccaaccaccgttggggtcttggggcaagaccatttctacatttttaatggcttggggtgccaatccaaaaatggttcgatcgcgccacatggtagactccgtaaagaatcgggtacttaaatacccgttgaatccttgaatgtatacagagaaaggaagctctgcccctaccattttataataggtgcccagcatgtccggcgtttccgtcccaacgatgtagctcttcacgcgttgttcaccaacaaacacctcgatccactttccgtagacctccatacgctgttcaatctcaggtactgcactttcggtaacaaagttttttaatcggacctcgccaactgtctttagtaagacctcgatggcgtcttttcttacaggatgtatgccatctactacccacccgttcgctgtgcgttctaaaactactgaagacggcttcttatcgcggataattaccttggtgatgctngccgtatccggcacggcaaagtcgtactgtgcctttaatgcttctaggccattactctgatccccaccagtgcaagcggttacaataacagcagttaaaaacgaaagactaatcaggttatgaatgcgcatattttcttctgcgtaataggttaaacagcaatgccgcgaggagcaaaagcacctcaggtactgccacatttagaagtttccatttacccgcttcagcaacgagtttttcgccatcgagtagacgcaacttnaaatcacgggtacgggtttgcatcaaacccttatcgtcaagcatgtaatcaacgacattcaatactaaatcatcattgccgtattgtatgcctgtgtattgatcgtaacccaatggcaatggttgaccgcgcggcaattcagggttgattaaattcacttgattgcgaatgaaatcaccgtcgctgaatacagccatggcgctcgtggggctttcctttaattgcggnaaacctttgcctgcagctttcggtgcaatgcgctgggcataggcactggtaaattttccttccaacagcacgcccgtcactaaatcgcgttgcgtaaaggcacgaggatcgggacgattatacaatgcctctaagcttaccgtatgcggcgcagcaaccgatttggaatttactgatgtacgaagcaaaatagacgaacgaatgcctggattttcgagggtatctaaggtcgaagcaaattcacctttgaccgcattcaaattctgaacagagggatgattttgagccgccaaaagcgggaaatatacccaaggctgtatgctcctgcgatcgtttacaccgccgcaacgtacgtcttgtatgacgtcggcattaatccgaacaccgtatttaaaaagtaagtctactatattaagatcatagatagccgggtaggccaagaattcgggaccaaaacttaagctgtccatttcggcatgtaccccatcaataaaccacatgagctttcctccgcccattacgtactgatccagtaggtatttatccaattccgaaaaagcttccgtcggcttcgccacaatagcacatttatacgtattcaagcggcgaaccatatcctgcaagtcagggtcaccgttcggtaaagccttgtaggctgccatagaaaaccggtctaccgtatagttttcgctcaacgccaatccaatgccagccgtttcaacagcactcaactcaccgtgtcctgtgatcatcgcgacctttggcttgtcggtagttagaagcgtatttancgctttcgcaagattaaattccaattgctgaatactaatattgacctgttccgccggttcatagaccattacatcttctagaagtacagccgttgcttcgcgttcttggtagctaagtatggcccctggaaaaacgttgagtacactctgtccgtcctta

SEQ ID NO: 1656 - DNA, 4000 bp, Escherichia coli
  misc_feature (1992)..(1992): n is a, c, g, or t
gattagccaagttatgattacgaatttgattgtagacaaataggttgaaaatgcggtgcataattcaggaagattatcgatgcatccataaaaaatgtcctcgtaatttgtaaaaataaagtcagggacaatactgtacgatgtgtagtcccaaaagcttaccaccaccaccaacaaaagtggcaatataaaaaaaagcccaatcgtgaccatgaagggaagcgctagtagggacgcgccatatttttcaatctgtttcagcatttagaccccggcacgcttttagaccctctttctcaaccctaacttacctggcttcgtaaactagccggcgcttcaccaactataaggtcagccggaggattggtcacaagcaacaatgtataacagcctctttgttaacgacaccagccgtgtcaaacaacaaaaacctaaaccgcgcgagcaaatattcatagtcgtttgttgcgtaaatatagccgggattgccaataaccatcacaccaagagaaattttcggcatcagtcgataacaacgaatcgtggtgttcaatcgttgccaaccaacgactaagtgaaacgaaaaagaaccaaaataaccttcaaactttttaaaaatgagtaaagtgaaatttatggaataaatattttttatagaaattcagtatattaagggaattattttcaaattcagtttaggatgatgtacatgcaaaaaacttttccctaatataaagcgaatacatgaagtaagagtggatatgtctgattgtcgcagcctgcgggcgttcgccggttgttccgttcagcaactgtgatgcgtatgcatgcctgtaataaataaaccaagtctagtgtggtgccgatgtctgaacttgaactgcaaaagcttcaaaaaaaatatggtgaaacaatcgcagtgcgtaaggttgaccttgttttaaacgagtcaaaatattgctgccttttgggtccatctggctgtggaaaaacctcgcttttgcgaatgattgcaggtcatgaggagatttcgtctggttcagttaccataaacggccaagatatttcagaaaaaccgccgtcacttcgaccgacatcaatgatgtttcagaattatgcgctttttcctcatttgaaagtgattgataatgttgcattcgctctcaaaatatccggaatagacaagcccacaagacatgaacgcgccatggaaatgttgcgcggagttcaacttggtaaactagcagatcggtttccaaaccagctatctggtgggcagcagcaaagggttgcacttgctcgtgcgctgattactgagccacgtgtcctgctacttgacgaaccgctctccgctttagacccatttttaaggattgagatgcgagctgagctgaaagcactccagagaaaattggggatctctttcatccacgtgacgcatagtcaagatgaggcgatggcgcttgctgacctaattcttgtcatgaatgacggtattgtggagcagtgcggcacaccgatggaaattttcaataagccgagcaatgcatttgttgcaaattttataggtggccacaacgtattggcgatcggctcgaaattatttgcgataagagaggacagaataaatttgacgcagaatggaaacagtcaggtaaacgccatcgagtttttgggcgctaacgtcaaaattaatgtgagttatggaaaaagtggaaatctgaccgttagccagtctgacgttttgtttgccaaggctaaaattgaggttggcgataatgttaaagtgagctggaataaaaaagatcaattagagctggtcaagtagtggaataacaaaacataagaattcaccaaatccactcgggttctaccgcacaagagcttcctcagagcaaacgtagttattcacggatggactggcaccttttagtttgtggggtgatgcaaataaagcactggagatgcttaaatcgcgatgtagtctattcnatgtgacagtgtaattcttggtgaggctgcttggtgtacattggtgtaacaaatgtcagcgtcatattttaagtcagtaaactgagagaagtgcttggtgactggtgaagcgttgactggggaaaaacaaaaataactggataaaatttgcaaggaggaaagtcaaaatgcaaaaaaacacgacacgtcgtaaggttctcaaaggagcaggcgccgtagcggcttatgctggtttggggcttggtatgccaagcgtagtgcgcgctaacgacaaagtggttcgttatcttggcacagcaaccacaatgggatctgaaatcgacaaaaaactctttgaagacactggtatcaaagtccagtacatccctgtcacaactgatgaagtaacaaaacgtgtgttaactcagcccaacagctttgacattgtcgataccgaatattttagtcttccaaaactagttccatctgggaatatcctgggtatggactcaaaacgtatcaaaaattttgataacataagtacgacccacacacttggagaaatcggtggtaaaaagattggtgaccaaggcactgcgccgaaaaaagtcttttacttgaaggatgaggcctctaaggaattttcctcggagcctactcgatgggcaacgctgatcccgacagttttcaatgctgatactttgggcattaggccagatctgatcggcaggccaattgacacatgggccgagcttttgaacccagagtttaagggaaaagcatcgatcttaaatatcccatcaattggaattatggatgccgcaatggtcgttgaatcaatgggtgaatataaatacccagacaaaggcaacatgacgcgtaaagagattgatatgacaatcggcatattaatcgaagcaaagaaacagggacaatttcgggctctctggtccgatttcaacgaaagcgtcaatttgatggcgtctggtgaagtagtaattcagtcaatgtggtcgccagcaattaccgccgttcggacgcagggcattccttgcatatatcaaccattgaaggaaggatatcgtgcttgggctgtgggctttgccttgtctgctgctaccaaaggctatcaagcagatgtttgttatgaattcatcaattggtatctctctggtttcgttggtggatatctaaaccgtcagggttactattcagctgtaccatcaactgccaaagaatacatggctgcctacgagtgggattactggatgcttggaaagcctgcaacacaggacataatggctccagatggcaaaaagctggctggtgctggtgaagtcagagatggtggatctttcgaagagcggatgggcggcgttgcttgttggaacgcaacaatggatgagaaccgttacatggtgcgtaaatggaatgaatttgtcgcagcgtaaatgcacctaactataaaatattcggcacccttttgggtgccgttttttttctgaagtggaaatttggatatggatgggtctgaatgtgcgaaactacaacgcgccaaggggcaattgagttttcacgtgagccaaaaacgtgtttcgcgcatgttccagtcaggctcggcgaagcttatgctgccaaaaacttactctgatatgatggaagcagtcattctcaacacctcaggcggtatgactggtggcgacattttaaatatcgatgttgaggctaaggattgcgcgcttgtgatgacaacgcaaactgctgaacgtgtgtatcgtagcgttggtaaaaggtctgcaaagatgcagatcaacctctcagtctctgatacagcagatctgcattggctgccccaagaaacgatcgtattcaatcactccaaatttgaacggacgctgaaaataaatttgtcttcctgcagcaactgtttagttgccgagacaattgttttgggccgtcaagccatgggcgagaatgtttatgattgccatttaattgataattggcgcgtgttccgtgacggcaattt

SEQ ID NO: 1657 - DNA, 4000 bp, Escherichia coli
  misc_feature (714)..(714): n is a, c, g, or t
  misc_feature (1946)..(1946): n is a, c, g, or t
  misc_feature (1975)..(1975): n is a, c, g, or t
  misc_feature (1981)..(1981): n is a, c, g, or t
  misc_feature (1985)..(1985): n is a, c, g, or t
  misc_feature (2185)..(2185): n is a, c, g, or t
  misc_feature (3319)..(3319): n is a, c, g, or t
gccggcgggttttccctttttgaacaaggggacttgaaaggagggatgctccacccataatccgtattcatcataacccatcacttttacataaattttatttttctcgattcccaattcttttagcgggtcatgtccgtctaggacgagtaaaaccacatcattcaaaatttcatctattttcatgggaggtttatccattttcagctcctttagttttcgccaacaattttatacacaccaccattgtaatcaataatatataattcaccatctgcatcttctccaaaggaagaaatatagttggtgaactctccgtcggcgatattgatttcctccgttcggttttggaattcaactgctttgccgttttttactttaaacgtccaaatattcccggagcagtaatccccaaaaaagtacgttccttttaatcctttaattttttcccctcggtaaacatatcccccggttacagaacatccatcaacatcgggctggtccattcctgttaaggttcgcatataattggcatcgtttgggtattcaaggatcggaatcgtcaaaccagttttaggacaattttcttcgggatcatagcaatgattggcttccatgatccgccaaccatagttgataccacccttgctgctccccggttcataattaatttcctcccatttattttggcccacatctccaatatataaatcnccattttcccggtcaaatgaaaagcgccagggattccgcaatccccaagcccagatttctccccgcttgttttcttgtccgtaataggggtttgtttcagggatgccatagggaatttgatttacgtcaattcggatcagtttcccaaaaagggtatttaaatcttgcccggccttgaatgggtctccagcctttcccccgtcgcccacggaaatatataagtacccatcaggtccaaaatccatgtggccgccattatgatttgagaaaggttgtttcaggtcaaacaaaatacgttcagacgtatgatcagctctttgcttattttttataatgaattctgacactactgtataaccgtcattgttcatataattcacataaaattttctattttttctatgatttggatggaatgcaaatcccagcaatccccgttcgtctcctgggcgatttggattcaccacgcgttttccgatatccaagaatggcgttttaagtttttctccattctgaataatcataattttcccagcttgttcaaccacataaagtagtgttgcatcgttgggatgtgatgcgacataaaggggttttttaaaaccgtcggcaatttcaatagatgaaagtgctgacgtttggctaaataatagaatgggaagaatgaatatgaattgttttaacatatgggaaattaacaaaagattatcaaagtcttctgactttgatttgggggtaggagatcccaaaaaatctttgttttgtctcttaattatttgttgttgatttattataaaggaattgaaatttttagaagaggtgttcttgttggtttgttttgattggtttcaaatatggaatgaatatatctccccgttatccaacccaatacccatccagcaagtacgtcagagacataatggtttcccacataaacttggctgtaaccactcaaaagtgtataaccaatcatgatagaggtattttttggagaagaaagcgccaatgacgttgcccatgcagccgttgtggccgcatgaccggaaggaaaagaaggtgtaaatcgtgtattccaaagtctgggattatattgtctttctggacggcttcgtttaaaagcatatttagaaataataatgggtagttgaacaatcatagcagttgccaagtgtggtctcagtttgtcgtgaccaatctgatcaaacccggaaaatccgaattcaatgaagggngtagccagggcgaagctttccatggcaanatccancggnggggaattatttttcccttcaagaaaagatgacagagattgatctgtttgtgtcattttattttgagtgaaggaaatagaactatataaaagaaatatggtaaggattttcattttagcctatcaaggaattctgcttcagataaaacagggatatccaattcagttgctttttttaacttagatccggcgcctggcccngccacaacaaaatcagtatttttactaaccgatccgctgacttttcccccatgtgcttcagtcatttcttttgcttcattccggctgaattgggttaaggcacctgtaaaaacaaatgtttttccttgaagcaacaggcttttgggtttttcaactttttttaatcgaatgcctaaagataagcaggattctattacattcgtattggtgcagttagataaaaatgtcgtaatagtttctgccacgatgggacccacttcatcaatggcttccagttcttcttcagcagctttcataaatttttctatgtcacccacaaaagctttttcaaggaccttagataaatgtgctcccacatttcgaatgccaagtgcatagacaaatcgtgcaaaagtggtttgttttgaatcttgaatagctgttaaaatattaagtgcagatttttctgccatacgatctaggttgaccaaatcatcaaaattgagtttaaatatatcatccacagtcagaatcaattttttatcaaccagttgatctaccagcttttcaccaaaaccatcaatatctaatgcccctttggatacaaaatgttctatgcggccttttacctgggcagggcaggagaggttttgacatcgggttaccacttctccttctggccgggacacctcttgcccacaagaaggacattctgttggaagttgatacgtttttgtttctggagggcgtttggcagggatgactttcaccacctctggtattacatctcccgcccgctggattaataccgtatcgccaactcggacatcttttcgatcaatttcatcctgattgtgcaaggttgcattggtcacaaccacaccaccaacattgacaggctcaagacgggcaaccggcgttacagcaccggtccggcccacggatggaataatattctgaaccagggtagtggcttgctgagctttgaatttacctgcgattgcccatcgcggggatcggctgcggatacccaatgcgtttcgttgattgattacatttactttaaatacggtgccgtcaattccatagggtaatgaatctcgtttggcttccaggttacgatgaaacgcaaccatcgtctcagcattgtttacnttttgtatttctgggtttaccgggaatccccattcttttaatgtggacaaaaaatcctcgtgtgtatcaaaagaaataccatcaattcttcctgcttcataacaataaatagataaaggtcttgttgccgtaatttttgaatcgagttgacgaagacttcccgcagcagcatttcttggattggcaaagggggagagctcctctttttcttgattccgattcagcttcttgaatccatccttggtaataaagacttctcctcgcacttctaacaaaggtggggttttttgcccgttttttcgtaaagacaggggaatcgccgtgattgtttttaagttttgggtaatatcctcacccgtaattccgtctccccgagtggatccatttacgaaaaatccattttcatacacgagttcaaccgcaagcccatccaattttggttccgccatatattcaagatctttttctgtatccaggccttttttgacccgggtgtcaaaggcagccaattcatcctcattcatggcgtttgccagagacagcatgggcatgcgatgtgtccaggaaccaaaagaagataatggttctgctcccacacggcgtgtgggagaatcttctgtaattaaattaggattatcagtctcaagcttttgcaattctctgaaaagctgatcatattca

SEQ ID NO: 1658 - DNA, 4000 bp, Escherichia coli
  misc_feature (287)..(287): n is a, c, g, or t
  misc_feature (344)..(344): n is a, c, g, or t
  misc_feature (1266)..(1266): n is a, c, g, or t
  misc_feature (2519)..(2519): n is a, c, g, or t
tcgctaagatcatagctcctggggtctcgaccctgcagctggacaagcgcgctgaggagttcatccgtgacaacggtgcgactcccgccttcctcggctacaatggcttccctgggagtctctgcacctcggtcaatgaccatgtggtgcacgggatcccttcctcgaaggtcgtactcaaggacggtgacatcgtctccgtcgactgcggcacgaagctcgcaggcttcactggggactccgcctacacgttcgctgtaggtgaggtagctcccgagactctggcnctccttcgcacgacgaaggaatccctctacatcggcatcgagcatgctgtagcgggnaagcgcgtcggtgatatcggcgctgcggtccagcagtattgtgaggcacgtggctatcatatcgtccgcgaacttgaaggccacgggatcgggaagaatatgcatgaggagccaggtgtgcccaacttcgggcgccgtggcacggggcctgagctccgctctgggatgtgcatctgcatcgagccaatggtgaacatgggctcgaagaatgtcatcttcgatcgcgatggctggaccgtccgtactaagacgggcaagccttcagcccacttcgagcactgcgtcgctatccgcgatggcaaggccgatatcctctcttcgtttgactttatcaaggaagtcttggtagacagagagttttaatctcgcaaccacagtatatgccgaagcaagcagcaatagaactcgacggtgtcatcctcgaagcgctctcgaacgcaatgttcaaggtcgagctcgagaacggacacgtcatcaccgcccacatctctgggaagatgcgtatgcactacatcaagatcctcccaggtgacaaggtcaaggtagagatgtctccctacgacttgactaaggggcgtatatcattcagatataaataaccctatatagatatgaaagtaagagcatcactcaagaagcgcaccgccgactgcaagatcgttcgtcgcaaggggcgtctgtacgtaatcaacaagaagaaccccaagttcaagcaacgccaggggtagtctctaaccatcggactatattttaacgaactaagataagtatggctatcagaattgttggcgtcgacttgccacaaaacaaacgaggagaaattgccttgacttacatcttcgggatcggtcgtagcagcgctaccaagatcctcgataaggctggggtcgatcgcaatatcaaggtaaaggactggaccgangaccaggctgccgctatccgtgaggtgatcggtgccgagtacaaggtcgaaggggatctgcgctccgaagtccagctcaacatcaagcgactgatggacatcggttgctaccgtggtgtccgccaccgtatcggtctgcctctacgcggtcagagtacgaagaacaatgctcgtactcgtaagggtaagaagaagactgtcgcaaataagaagaaagctactaagtaatagagattgatatggcaaagaaagtagtcgcaaagaagaaggtcgtcaagatcgacgctgtgggccaggctcacatccactcttcttttaataacatcatcatctctctgaccaacaacgaaggtcaggtcatcagctggtcttcggctggtaagatgggattccgtagctctaagaagaacaccccttacgctgctcagatggcggcccaggattgcgctaaggtcgcttacgacctcggtctgcgcaaggtcaaggtcttcgtcaagggtccaggtaacggccgtgagtctgctatccgcaccatccatggcgctggtatcgaagtcactgagatcgtcgacgtgaccccaatgccacacaatggctgccgtcctcctaagcgtcgtcgcgtctaatccctgacttcgcttcagatcacagagtagtttcataaagatcgcagtacactcccagagacgcttcgctcaccgtgctccctccatcgagcacaagggcgcgagcgaacgctaagagtcctgagctaagcaaggcgccgaggtagacgacgagtgaaagattggctatactttcatatatctatcctctcctcataaccggtcgcggctgcactccgcctccctcccgccacccgctgctctctgcctccagcgttgcctctccccgagaggtcgctcgtactgcttcaacaatagaagacaatggcaagatatacaggtccaaaatcaaagatcgcccgtaagcttggcgcacctatcttcggtgccgacaaggtactctccaagaagaactatcctcctggacagcacggcaacaaccgccgtcgtaagacgagcgaatatggcatccagctcaaggaaaagcagaaggctaagtacacctatggcgtactcgagcgtcagttccgcaacctcttcgaaaaggctcagcgcacgaagggtgtcacgggtgaagtgctcctccagctcctggaaagccgcctcgacaacgtcgtctatcgcctcggcatcgctaagacgcgtgcngctgctcgtcagctcgtctcgcaccgtcacatcaccgtcgatggtcaggtagtcaacatcccttcttacaccctcaagcccggccaggtcgtcggcgtccgtgagaaggcgaagagcttagaggtcatcaccgactctctggctggtcgtagccacagcagctacagctggctcgagtggaatcaggcttctctctccggtaagttcctcagcgctcctcagcgtgaagacatccccgaagagatcaaggagcagctgatcgtcgaactatactctaagtaataatccctattatctcactcacatggcaatattagcatttcagaagcccgaaaacgtcctcatgatggatgcgacggactcgtacgctaagttcgagttccgccctcttgagccgggatatggtaccactgtcggtaatgccctgcgtcgtatactcctttcttcactcgaaggctacgccatctcgaccatcaagatcgaaggtgtcaatcatgaatttgctactattccgggtgtcttggaggatgtaactaacatcattctcaacctgaagcaagtccgcttccgtgccctcgtccaggacgctactgaggagaccgtcagcctgacgatctctggtcagcagcagttcctcgctggcgagctcaacggcaagcttacttccttcgaagtcctcaatcccgagctggtcatctgccacatcgatgaggcgtatacccttactatcgagctctccatcaacaaggggcgtggttacatccccgctgatgagaagctggtcgacacggctcaggagaatgagctgcagacgatcgctatcgactcgatctatacgcctatccgtaatgtcaagtacttcacggagaactatcgtgtagagcagaagactgactacgagaagctgaccctcgagatcaccactgacgggagcattcatccccagcaggctctcaaggacgcagcagctatcctcatcgagcacttcagcctcttcatctctgaccctgtcgaggtagaagagaatgcagtcatcgaggaaggcgacgaggaggtactggacatgcaggagatcgatcgcgtatctcagctgctccgtactgatctcaaggatctcgatctctccgtccgtgcgcagaactgcctccgctccggcaacgtattccgtctggccgacctcgtcgtcctcgacgctgatacgctcagcaagttccgcaacttcggtaagaagtctatggacgagctcaacgagctgatggagcgactcggactcaccttcgggatggatgttagcaagtacaatttagataatgactaagtagaaagatgagacataataagaaattcaatcatctcggtcgtaagaaggcgcaccgcgaggctatgctttccaacatggctgcatcgctcatcctgcacaagcgcatcttcaccacggtcgctaaggctaaggctcttcgcgtatacgtcgagcccctgct

SEQ ID NO: 1659 - DNA, 4000 bp, Escherichia coli
  misc_feature (54)..(54): n is a, c, g, or t
  misc_feature (129)..(129): n is a, c, g, or t
  misc_feature (135)..(135): n is a, c, g, or t
  misc_feature (156)..(156): n is a, c, g, or t
  misc_feature (160)..(160): n is a, c, g, or t
  misc_feature (162)..(162): n is a, c, g, or t
  misc_feature (168)..(168): n is a, c, g, or t
  misc_feature (171)..(171): n is a, c, g, or t
  misc_feature (181)..(181): n is a, c, g, or t
  misc_feature (184)..(186): n is a, c, g, or t
  misc_feature (192)..(192): n is a, c, g, or t
  misc_feature (198)..(198): n is a, c, g, or t
  misc_feature (201)..(201): n is a, c, g, or t
  misc_feature (213)..(213): n is a, c, g, or t
  misc_feature (218)..(218): n is a, c, g, or t
  misc_feature (222)..(224): n is a, c, g, or t
  misc_feature (246)..(246): n is a, c, g, or t
  misc_feature (303)..(303): n is a, c, g, or t
  misc_feature (327)..(327): n is a, c, g, or t
  misc_feature (393)..(393): n is a, c, g, or t
  misc_feature (417)..(417): n is a, c, g, or t
  misc_feature (442)..(442): n is a, c, g, or t
  misc_feature (453)..(453): n is a, c, g, or t
  misc_feature (482)..(482): n is a, c, g, or t
  misc_feature (504)..(504): n is a, c, g, or t
  misc_feature (589)..(589): n is a, c, g, or t
  misc_feature (591)..(591): n is a, c, g, or t
  misc_feature (600)..(600): n is a, c, g, or t
  misc_feature (615)..(615): n is a, c, g, or t
  misc_feature (652)..(652): n is a, c, g, or t
  misc_feature (696)..(696): n is a, c, g, or t
  misc_feature (699)..(699): n is a, c, g, or t
  misc_feature (758)..(759): n is a, c, g, or t
  misc_feature (774)..(775): n is a, c, g, or t
  misc_feature (777)..(777): n is a, c, g, or t
  misc_feature (780)..(780): n is a, c, g, or t
  misc_feature (800)..(800): n is a, c, g, or t
  misc_feature (820)..(821): n is a, c, g, or t
  misc_feature (1794)..(1794): n is a, c, g, or t
  misc_feature (1927)..(1927): n is a, c, g, or t
  misc_feature (2148)..(2149): n is a, c, g, or t
  misc_feature (2195)..(2195): n is a, c, g, or t
  misc_feature (2203)..(2203): n is a, c, g, or t
  misc_feature (2210)..(2210): n is a, c, g, or t
  misc_feature (2212)..(2212): n is a, c, g, or t
  misc_feature (2218)..(2218): n is a, c, g, or t
  misc_feature (2222)..(2222): n is a, c, g, or t
  misc_feature (2240)..(2240): n is a, c, g, or t
  misc_feature (2243)..(2243): n is a, c, g, or t
  misc_feature (2246)..(2247): n is a, c, g, or t
  misc_feature (2250)..(2250): n is a, c, g, or t
  misc_feature (2263)..(2264): n is a, c, g, or t
  misc_feature (2275)..(2275): n is a, c, g, or t
  misc_feature (2277)..(2277): n is a, c, g, or t
  misc_feature (2281)..(2281): n is a, c, g, or t
  misc_feature (2309)..(2309): n is a, c, g, or t
  misc_feature (2313)..(2313): n is a, c, g, or t
  misc_feature (2319)..(2319): n is a, c, g, or t
  misc_feature (2321)..(2321): n is a, c, g, or t
  misc_feature (2323)..(2323): n is a, c, g, or t
  misc_feature (2335)..(2335): n is a, c, g, or t
  misc_feature (2338)..(2338): n is a, c, g, or t
  misc_feature (2346)..(2346): n is a, c, g, or t
  misc_feature (2352)..(2352): n is a, c, g, or t
  misc_feature (2354)..(2355): n is a, c, g, or t
  misc_feature (2359)..(2359): n is a, c, g, or t
  misc_feature (2388)..(2388): n is a, c, g, or t
  misc_feature (2432)..(2434): n is a, c, g, or t
  misc_feature (2442)..(2442): n is a, c, g, or t
  misc_feature (2448)..(2449): n is a, c, g, or t
  misc_feature (2452)..(2453): n is a, c, g, or t
  misc_feature (2458)..(2461): n is a, c, g, or t
  misc_feature (2463)..(2463): n is a, c, g, or t
  misc_feature (2468)..(2469): n is a, c, g, or t
  misc_feature (2471)..(2471): n is a, c, g, or t
  misc_feature (2474)..(2474): n is a, c, g, or t
  misc_feature (2481)..(2481): n is a, c, g, or t
  misc_feature (2483)..(2483): n is a, c, g, or t
  misc_feature (2486)..(2487): n is a, c, g, or t
  misc_feature (2489)..(2490): n is a, c, g, or t
  misc_feature (2493)..(2495): n is a, c, g, or t
  misc_feature (2500)..(2502): n is a, c, g, or t
  misc_feature (2505)..(2505): n is a, c, g, or t
  misc_feature (2507)..(2508): n is a, c, g, or t
  misc_feature (2510)..(2515): n is a, c, g, or t
  misc_feature (2517)..(2518): n is a, c, g, or t
  misc_feature (2520)..(2523): n is a, c, g, or t
  misc_feature (2526)..(2528): n is a, c, g, or t
  misc_feature (2532)..(2533): n is a, c, g, or t
  misc_feature (2535)..(2535): n is a, c, g, or t
  misc_feature (2538)..(2539): n is a, c, g, or t
  misc_feature (2541)..(2541): n is a, c, g, or t
  misc_feature (2544)..(2544): n is a, c, g, or t
  misc_feature (2547)..(2547): n is a, c, g, or t
  misc_feature (2549)..(2550): n is a, c, g, or t
  misc_feature (2552)..(2552): n is a, c, g, or t
  misc_feature (2555)..(2556): n is a, c, g, or t
  misc_feature (2558)..(2558): n is a, c, g, or t
  misc_feature (2560)..(2560): n is a, c, g, or t
  misc_feature (2562)..(2562): n is a, c, g, or t
  misc_feature (2564)..(2565): n is a, c, g, or t
  misc_feature (2567)..(2567): n is a, c, g, or t
  misc_feature (2570)..(2574): n is a, c, g, or t
  misc_feature (2576)..(2578): n is a, c, g, or t
  misc_feature (2581)..(2583): n is a, c, g, or t
  misc_feature (2585)..(2589): n is a, c, g, or t
  misc_feature (2591)..(2591): n is a, c, g, or t
  misc_feature (2593)..(2596): n is a, c, g, or t
  misc_feature (2600)..(2601): n is a, c, g, or t
  misc_feature (2603)..(2604): n is a, c, g, or t
  misc_feature (2615)..(2616): n is a, c, g, or t
  misc_feature (2618)..(2618): n is a, c, g, or t
  misc_feature (2621)..(2621): n is a, c, g, or t
  misc_feature (2625)..(2625): n is a, c, g, or t
  misc_feature (2627)..(2628): n is a, c, g, or t
  misc_feature (2630)..(2631): n is a, c, g, or t
  misc_feature (2633)..(2633): n is a, c, g, or t
  misc_feature (2636)..(2637): n is a, c, g, or t
  misc_feature (2641)..(2641): n is a, c, g, or t
  misc_feature (2643)..(2643): n is a, c, g, or t
  misc_feature (2646)..(2647): n is a, c, g, or t
  misc_feature (2649)..(2651): n is a, c, g, or t
  misc_feature (2655)..(2658): n is a, c, g, or t
  misc_feature (2660)..(2660): n is a, c, g, or t
  misc_feature (2663)..(2663): n is a, c, g, or t
  misc_feature (2665)..(2666): n is a, c, g, or t
  misc_feature (2668)..(2668): n is a, c, g, or t
  misc_feature (2670)..(2670): n is a, c, g, or t
  misc_feature (2673)..(2674): n is a, c, g, or t
  misc_feature (2679)..(2679): n is a, c, g, or t
  misc_feature (2681)..(2683): n is a, c, g, or t
  misc_feature (2686)..(2687): n is a, c, g, or t
  misc_feature (2690)..(2690): n is a, c, g, or t
  misc_feature (2692)..(2693): n is a, c, g, or t
  misc_feature (2695)..(2695): n is a, c, g, or t
  misc_feature (2701)..(2701): n is a, c, g, or t
  misc_feature (2703)..(2703): n is a, c, g, or t
  misc_feature (2705)..(2705): n is a, c, g, or t
  misc_feature (2707)..(2709): n is a, c, g, or t
  misc_feature (2715)..(2715): n is a, c, g, or t
  misc_feature (2717)..(2718): n is a, c, g, or t
  misc_feature (2720)..(2723): n is a, c, g, or t
  misc_feature (2727)..(2727): n is a, c, g, or t
  misc_feature (2730)..(2731): n is a, c, g, or t
  misc_feature (2733)..(2733): n is a, c, g, or t
  misc_feature (2738)..(2738): n is a, c, g, or t
  misc_feature (2740)..(2742): n is a, c, g, or t
  misc_feature (2745)..(2746): n is a, c, g, or t
  misc_feature (2748)..(2749): n is a, c, g, or t
  misc_feature (2751)..(2752): n is a, c, g, or t
  misc_feature (2754)..(2754): n is a, c, g, or t
  misc_feature (2756)..(2760): n is a, c, g, or t
  misc_feature (2767)..(2768): n is a, c, g, or t
  misc_feature (2771)..(2772): n is a, c, g, or t
  misc_feature (2776)..(2778): n is a, c, g, or t
  misc_feature (2780)..(2782): n is a, c, g, or t
  misc_feature (2789)..(2791): n is a, c, g, or t
  misc_feature (2795)..(2795): n is a, c, g, or t
  misc_feature (2798)..(2799): n is a, c, g, or t
  misc_feature (2802)..(2802): n is a, c, g, or t
  misc_feature (2804)..(2804): n is a, c, g, or t
  misc_feature (2807)..(2811): n is a, c, g, or t
  misc_feature (2813)..(2814): n is a, c, g, or t
  misc_feature (2816)..(2816): n is a, c, g, or t
  misc_feature (2820)..(2823): n is a, c, g, or t
  misc_feature (2825)..(2829): n is a, c, g, or t
  misc_feature (2831)..(2832): n is a, c, g, or t
  misc_feature (2834)..(2836): n is a, c, g, or t
  misc_feature (2838)..(2839): n is a, c, g, or t
  misc_feature (2842)..(2842): n is a, c, g, or t
  misc_feature (2844)..(2845): n is a, c, g, or t
  misc_feature (2847)..(2850): n is a, c, g, or t
  misc_feature (2852)..(2853): n is a, c, g, or t
  misc_feature (2855)..(2857): n is a, c, g, or t
  misc_feature (2859)..(2860): n is a, c, g, or t
  misc_feature (2865)..(2871): n is a, c, g, or t
  misc_feature (2873)..(2873): n is a, c, g, or t
  misc_feature (2875)..(2880): n is a, c, g, or t
  misc_feature (2882)..(2883): n is a, c, g, or t
  misc_feature (2885)..(2886): n is a, c, g, or t
  misc_feature (2889)..(2890): n is a, c, g, or t
  misc_feature (2892)..(2897): n is a, c, g, or t
  misc_feature (2899)..(2901): n is a, c, g, or t
  misc_feature (2903)..(2903): n is a, c, g, or t
  misc_feature (2906)..(2914): n is a, c, g, or t
  misc_feature (2916)..(2916): n is a, c, g, or t
  misc_feature (2920)..(2920): n is a, c, g, or t
  misc_feature (2923)..(2923): n is a, c, g, or t
  misc_feature (2925)..(2938): n is a, c, g, or t
  misc_feature (2940)..(2942): n is a, c, g, or t
  misc_feature (2944)..(2950): n is a, c, g, or t
  misc_feature (2952)..(2959): n is a, c, g, or t
  misc_feature (2962)..(2963): n is a, c, g, or t
  misc_feature (2965)..(2965): n is a, c, g, or t
  misc_feature (2967)..(2971): n is a, c, g, or t
  misc_feature (2974)..(2976): n is a, c, g, or t
  misc_feature (2978)..(2982): n is a, c, g, or t
  misc_feature (2984)..(2984): n is a, c, g, or t
  misc_feature (2986)..(2991): n is a, c, g, or t
  misc_feature (2993)..(2994): n is a, c, g, or t
  misc_feature (2996)..(2997): n is a, c, g, or t
  misc_feature (2999)..(3001): n is a, c, g, or t
  misc_feature (3003)..(3004): n is a, c, g, or t
  misc_feature (3006)..(3008): n is a, c, g, or t
  misc_feature (3011)..(3013): n is a, c, g, or t
  misc_feature (3015)..(3021): n is a, c, g, or t
  misc_feature (3023)..(3028): n is a, c, g, or t
  misc_feature (3030)..(3034): n is a, c, g, or t
  misc_feature (3038)..(3039): n is a, c, g, or t
  misc_feature (3042)..(3042): n is a, c, g, or t
  misc_feature (3044)..(3044): n is a, c, g, or t
  misc_feature (3047)..(3049): n is a, c, g, or t
  misc_feature (3051)..(3054): n is a, c, g, or t
  misc_feature (3056)..(3057): n is a, c, g, or t
  misc_feature (3062)..(3063): n is a, c, g, or t
  misc_feature (3065)..(3066): n is a, c, g, or t
  misc_feature (3071)..(3071): n is a, c, g, or t
  misc_feature (3075)..(3077): n is a, c, g, or t
  misc_feature (3079)..(3080): n is a, c, g, or t
  misc_feature (3083)..(3086): n is a, c, g, or t
  misc_feature (3090)..(3090): n is a, c, g, or t
  misc_feature (3093)..(3102): n is a, c, g, or t
  misc_feature (3104)..(3104): n is a, c, g, or t
  misc_feature (3106)..(3111): n is a, c, g, or t
  misc_feature (3113)..(3113): n is a, c, g, or t
  misc_feature (3115)..(3120): n is a, c, g, or t
  misc_feature (3123)..(3123): n is a, c, g, or t
  misc_feature (3125)..(3127): n is a, c, g, or t
  misc_feature (3129)..(3129): n is a, c, g, or t
  misc_feature (3131)..(3132): n is a, c, g, or t
  misc_feature (3134)..(3135): n is a, c, g, or t
  misc_feature (3137)..(3146): n is a, c, g, or t
  misc_feature (3148)..(3148): n is a, c, g, or t
  misc_feature (3150)..(3150): n is a, c, g, or t
  misc_feature (3152)..(3153): n is a, c, g, or t
  misc_feature (3156)..(3162): n is a, c, g, or t
  misc_feature (3164)..(3164): n is a, c, g, or t
  misc_feature (3166)..(3170): n is a, c, g, or t
  misc_feature (3173)..(3174): n is a, c, g, or t
  misc_feature (3176)..(3180): n is a, c, g, or t
  misc_feature (3182)..(3183): n is a, c, g, or t
  misc_feature (3185)..(3185): n is a, c, g, or t
  misc_feature (3187)..(3189): n is a, c, g, or t
  misc_feature (3191)..(3192): n is a, c, g, or t
  misc_feature (3194)..(3197): n is a, c, g, or t
  misc_feature (3199)..(3201): n is a, c, g, or t
  misc_feature (3203)..(3203): n is a, c, g, or t
  misc_feature (3205)..(3207): n is a, c, g, or t
  misc_feature (3209)..(3210): n is a, c, g, or t
  misc_feature (3212)..(3213): n is a, c, g, or t
  misc_feature (3215)..(3221): n is a, c, g, or t
  misc_feature (3223)..(3226): n is a, c, g, or t
  misc_feature (3228)..(3230): n is a, c, g, or t
  misc_feature (3234)..(3234): n is a, c, g, or t
  misc_feature (3237)..(3246): n is a, c, g, or t
  misc_feature (3248)..(3249): n is a, c, g, or t
  misc_feature (3252)..(3257): n is a, c, g, or t
  misc_feature (3259)..(3261): n is a, c, g, or t
  misc_feature (3263)..(3264): n is a, c, g, or t
  misc_feature (3266)..(3270): n is a, c, g, or t
  misc_feature (3272)..(3279): n is a, c, g, or t
  misc_feature (3281)..(3282): n is a, c, g, or t
  misc_feature (3284)..(3285): n is a, c, g, or t
  misc_feature (3287)..(3290): n is a, c, g, or t
  misc_feature (3292)..(3295): n is a, c, g, or t
  misc_feature (3299)..(3300): n is a, c, g, or t
  misc_feature (3302)..(3303): n is a, c, g, or t
  misc_feature (3305)..(3306): n is a, c, g, or t
  misc_feature (3308)..(3308): n is a, c, g, or t
  misc_feature (3311)..(3311): n is a, c, g, or t
  misc_feature (3314)..(3319): n is a, c, g, or t
  misc_feature (3321)..(3324): n is a, c, g, or t
  misc_feature (3326)..(3327): n is a, c, g, or t
  misc_feature (3329)..(3330): n is a, c, g, or t
  misc_feature (3332)..(3333): n is a, c, g, or t
  misc_feature (3335)..(3362): n is a, c, g, or t
  misc_feature (3364)..(3366): n is a, c, g, or t
  misc_feature (3369)..(3372): n is a, c, g, or t
  misc_feature (3374)..(3375): n is a, c, g, or t
  misc_feature (3379)..(3381): n is a, c, g, or t
  misc_feature (3383)..(3384): n is a, c, g, or t
  misc_feature (3387)..(3390): n is a, c, g, or t
  misc_feature (3393)..(3393): n is a, c, g, or t
  misc_feature (3395)..(3396): n is a, c, g, or t
  misc_feature (3398)..(3405): n is a, c, g, or t
  misc_feature (3407)..(3408): n is a, c, g, or t
  misc_feature (3410)..(3411): n is a, c, g, or t
  misc_feature (3413)..(3414): n is a, c, g, or t
  misc_feature (3417)..(3417): n is a, c, g, or t
  misc_feature (3419)..(3423): n is a, c, g, or t
  misc_feature (3425)..(3425): n is a, c, g, or t
  misc_feature (3428)..(3429): n is a, c, g, or t
  misc_feature (3431)..(3432): n is a, c, g, or t
  misc_feature (3434)..(3440): n is a, c, g, or t
  misc_feature (3443)..(3444): n is a, c, g, or t
  misc_feature (3446)..(3447): n is a, c, g, or t
  misc_feature (3449)..(3453): n is a, c, g, or t
  misc_feature (3457)..(3457): n is a, c, g, or t
  misc_feature (3462)..(3462): n is a, c, g, or t
  misc_feature (3464)..(3464): n is a, c, g, or t
  misc_feature (3468)..(3468): n is a, c, g, or t
  misc_feature (3471)..(3472): n is a, c, g, or t
  misc_feature (3474)..(3474): n is a, c, g, or t
  misc_feature (3476)..(3477): n is a, c, g, or t
  misc_feature (3482)..(3483): n is a, c, g, or t
  misc_feature (3485)..(3487): n is a, c, g, or t
  misc_feature (3489)..(3489): n is a, c, g, or t
  misc_feature (3491)..(3495): n is a, c, g, or t
  misc_feature (3498)..(3501): n is a, c, g, or t
  misc_feature (3504)..(3504): n is a, c, g, or t
  misc_feature (3506)..(3516): n is a, c, g, or t
  misc_feature (3519)..(3520): n is a, c, g, or t
  misc_feature (3522)..(3522): n is a, c, g, or t
  misc_feature (3525)..(3525): n is a, c, g, or t
  misc_feature (3527)..(3528): n is a, c, g, or t
  misc_feature (3530)..(3530): n is a, c, g, or t
  misc_feature (3535)..(3537): n is a, c, g, or t
  misc_feature (3539)..(3540): n is a, c, g, or t
  misc_feature (3542)..(3553): n is a, c, g, or t
  misc_feature (3555)..(3556): n is a, c, g, or t
  misc_feature (3558)..(3559): n is a, c, g, or t
  misc_feature (3561)..(3562): n is a, c, g, or t
  misc_feature (3564)..(3565): n is a, c, g, or t
  misc_feature (3567)..(3568): n is a, c, g, or t
  misc_feature (3571)..(3573): n is a, c, g, or t
  misc_feature (3579)..(3579): n is a, c, g, or t
  misc_feature (3581)..(3582): n is a, c, g, or t
  misc_feature (3584)..(3584): n is a, c, g, or t
  misc_feature (3587)..(3588): n is a, c, g, or t
  misc_feature (3590)..(3594): n is a, c, g, or t
  misc_feature (3596)..(3597): n is a, c, g, or t
  misc_feature (3599)..(3603): n is a, c, g, or t
  misc_feature (3605)..(3605): n is a, c, g, or t
  misc_feature (3608)..(3609): n is a, c, g, or t
  misc_feature (3611)..(3615): n is a, c, g, or t
  misc_feature (3618)..(3620): n is a, c, g, or t
  misc_feature (3623)..(3624): n is a, c, g, or t
  misc_feature (3627)..(3627): n is a, c, g, or t
  misc_feature (3629)..(3630): n is a, c, g, or t
  misc_feature (3634)..(3635): n is a, c, g, or t
  misc_feature (3637)..(3637): n is a, c, g, or t
  misc_feature (3642)..(3642): n is a, c, g, or t
  misc_feature (3645)..(3648): n is a, c, g, or t
  misc_feature (3650)..(3650): n is a, c, g, or t
  misc_feature (3653)..(3653): n is a, c, g, or t
  misc_feature (3655)..(3660): n is a, c, g, or t
  misc_feature (3662)..(3662): n is a, c, g, or t
  misc_feature (3664)..(3664): n is a, c, g, or t
  misc_feature (3666)..(3666): n is a, c, g, or t
  misc_feature (3668)..(3671): n is a, c, g, or t
  misc_feature (3675)..(3676): n is a, c, g, or t
  misc_feature (3678)..(3679): n is a, c, g, or t
  misc_feature (3682)..(3683): n is a, c, g, or t
  misc_feature (3687)..(3687): n is a, c, g, or t
  misc_feature (3692)..(3692): n is a, c, g, or t
  misc_feature (3695)..(3695): n is a, c, g, or t
  misc_feature (3698)..(3699): n is a, c, g, or t
  misc_feature (3702)..(3704): n is a, c, g, or t
  misc_feature (3706)..(3706): n is a, c, g, or t
  misc_feature (3710)..(3710): n is a, c, g, or t
  misc_feature (3713)..(3715): n is a, c, g, or t
  misc_feature (3717)..(3717): n is a, c, g, or t
  misc_feature (3719)..(3719): n is a, c, g, or t
  misc_feature (3723)..(3723): n is a, c, g, or t
  misc_feature (3726)..(3727): n is a, c, g, or t
  misc_feature (3730)..(3730): n is a, c, g, or t
  misc_feature (3732)..(3732): n is a, c, g, or t
  misc_feature (3734)..(3734): n is a, c, g, or t
  misc_feature (3736)..(3737): n is a, c, g, or t
  misc_feature (3740)..(3740): n is a, c, g, or t
  misc_feature (3744)..(3744): n is a, c, g, or t
  misc_feature (3747)..(3747): n is a, c, g, or t
  misc_feature (3750)..(3751): n is a, c, g, or t
  misc_feature (3753)..(3753): n is a, c, g, or t
  misc_feature (3756)..(3756): n is a, c, g, or t
  misc_feature (3758)..(3758): n is a, c, g, or t
  misc_feature (3763)..(3763): n is a, c, g, or t
  misc_feature (3765)..(3765): n is a, c, g, or t
  misc_feature (3770)..(3771): n is a, c, g, or t
  misc_feature (3773)..(3777): n is a, c, g, or t
  misc_feature (3780)..(3781): n is a, c, g, or t
  misc_feature (3785)..(3786): n is a, c, g, or t
  misc_feature (3788)..(3789): n is a, c, g, or t
  misc_feature (3791)..(3791): n is a, c, g, or t
  misc_feature (3794)..(3794): n is a, c, g, or t
  misc_feature (3798)..(3798): n is a, c, g, or t
  misc_feature (3803)..(3803): n is a, c, g, or t
  misc_feature (3806)..(3807): n is a, c, g, or t
  misc_feature (3810)..(3810): n is a, c, g, or t
  misc_feature (3812)..(3812): n is a, c, g, or t
  misc_feature (3815)..(3816): n is a, c, g, or t
  misc_feature (3818)..(3819): n is a, c, g, or t
  misc_feature (3821)..(3821): n is a, c, g, or t
  misc_feature (3824)..(3826): n is a, c, g, or t
  misc_feature (3828)..(3828): n is a, c, g, or t
  misc_feature (3831)..(3831): n is a, c, g, or t
  misc_feature (3833)..(3834): n is a, c, g, or t
  misc_feature (3836)..(3838): n is a, c, g, or t
  misc_feature (3840)..(3840): n is a, c, g, or t
  misc_feature (3842)..(3843): n is a, c, g, or t
  misc_feature (3845)..(3846): n is a, c, g, or t
  misc_feature (3849)..(3849): n is a, c, g, or t
  misc_feature (3851)..(3852): n is a, c, g, or t
  misc_feature (3854)..(3855): n is a, c, g, or t
  misc_feature (3857)..(3858): n is a, c, g, or t
  misc_feature (3863)..(3864): n is a, c, g, or t
  misc_feature (3866)..(3867): n is a, c, g, or t
  misc_feature (3869)..(3870): n is a, c, g, or t
  misc_feature (3875)..(3875): n is a, c, g, or t
  misc_feature (3878)..(3878): n is a, c, g, or t
  misc_feature (3882)..(3882): n is a, c, g, or t
  misc_feature (3884)..(3885): n is a, c, g, or t
  misc_feature (3887)..(3888): n is a, c, g, or t
  misc_feature (3890)..(3891): n is a, c, g, or t
  misc_feature (3894)..(3900): n is a, c, g, or t
  misc_feature (3902)..(3902): n is a, c, g, or t
  misc_feature (3905)..(3906): n is a, c, g, or t
  misc_feature (3908)..(3909): n is a, c, g, or t
  misc_feature (3911)..(3912): n is a, c, g, or t
  misc_feature (3914)..(3914): n is a, c, g, or t
  misc_feature (3916)..(3921): n is a, c, g, or t
  misc_feature (3923)..(3924): n is a, c, g, or t
  misc_feature (3926)..(3927): n is a, c, g, or t
  misc_feature (3929)..(3931): n is a, c, g, or t
  misc_feature (3933)..(3936): n is a, c, g, or t
  misc_feature (3938)..(3940): n is a, c, g, or t
  misc_feature (3942)..(3942): n is a, c, g, or t
  misc_feature (3944)..(3944): n is a, c, g, or t
  misc_feature (3946)..(3948): n is a, c, g, or t
  misc_feature (3950)..(3951): n is a, c, g, or t
  misc_feature (3953)..(3954): n is a, c, g, or t
  misc_feature (3956)..(3957): n is a, c, g, or t
  misc_feature (3959)..(3962): n is a, c, g, or t
  misc_feature (3965)..(3966): n is a, c, g, or t
  misc_feature (3968)..(3969): n is a, c, g, or t
  misc_feature (3971)..(3971): n is a, c, g, or t
  misc_feature (3974)..(3975): n is a, c, g, or t
  misc_feature (3977)..(3978): n is a, c, g, or t
  misc_feature (3980)..(3981): n is a, c, g, or t
  misc_feature (3983)..(3983): n is a, c, g, or t
  misc_feature (3989)..(3990): n is a, c, g, or t
  misc_feature (3992)..(3992): n is a, c, g, or t
  misc_feature (3995)..(3995): n is a, c, g, or t
  misc_feature (3999)..(3999): n is a, c, g, or t
agccgcgccaaaaccgccgcccgcctgcctgcatacgccgcgcaactgcaagcnctgggctttccctgccagtatttgcacggcgacgaactgcaagaactggaaccggcgctcgcccgccaacacggnggcatncactaccagcgctcggcgcanatcntngacctngcngccctcggcncgnnnctcgcncaagcnctncgcgcgagcggnggcancatnnncgaacacagccgcatcaccgcngcccgccgcgaaaacagcggcttcagcctcaaagcggaaaatggcgacagccaccangccgaccgcctcatcctctgcgcnggtgcgcacagcaaggcgctggccgacagcctcaccggcctgcgtgtaccgctggataccgaacgnggctaccacctcatgctgccgcangaagccgcgcgcctgcgcctgcccntctccagcatngaccacagcttcgtcatgacaccgatgcngcacggcctgcgcctcgccggnacggtggaatacgcgggactcgaagcgccgccgaacatggcgcgcgcgcagaacctgcggccattggcggaaaaactgctgcaancnccgctggangcccgcgatgcccanccctggatgggcttccgcccgaccaccgccgacagcntgccggtcatcgaccgcgatggcgacctgctcctcgccttcggncancagcacctcggcctgacgcaagcggcgctcaccgcggaaatcctcagcgcgctttactnnggcgaaaccccgccnntnganctcaccccctaccgcctgcnccgttttgcctgaaacggcnncgcggatacggcacatttcacaaaattccacagcacaaaccccacaaccgcacccgcaacgcggcgaaatccggtttttttaacaaccctcactcaaatttccacaaaccacacaagccgcttataatgcccgccgttctcatcggggtgtcggcgctgccggctgagagttacccgcagaacctgatccggatcatgccggcggagggattgaggcattctctacctttgcggctggtcttctttcttgaaaacgaggtgcaaagtgttcaaaaaactcctgattcttctttctttcgccgccgcggccgccagtgccaagccggtgctcaccgtctatacctacagctctttcaacacccaatggggcgcgggtcccggtctgaaagccgcctttgaaaaagtctgcgactgcgaggtgaaatatgtcgcccttgatcacggcgtgatgattctgaaccgcctgcgccaagagggcgagcagaacggcgccgatgtcatcatcggcattgacaacaccctgatgcaaaccgcgctcgataccggcctgttcgcgccgagcggcgtggataccagcaagctgaaactgccggacggctggacggatccggtgttcgtcccgtatgactacggctggttcagcttcgtctacgacaagacccgcctgaaaaacccgccgcgcagcctgcacgagctggtggaaagccaagagccgtggacggtgatttattccgacccgcgcgtcagcacgccggggcaaggtttcatgctgtggatgcagaaggtgtttggcgatgacgcccccgccgcctgggaaaaactggcgaagaaaaccgtaaccgtcaccaagggctccagcgaagcctacagcctctttagcaaaggcgagagcgacatggcgctttattattcgacctcgcccgcctatcagttgatgaaggaaaacaaggacatttacgccgccgcgctgttngacgaagggcattatttgcaggtggaagtcgccgcgcgtacccgcaccagcaaacagccggagctggcgcagaaattcctcgagttcctcatcacgcccgctttccaggaaaacatcgccaccaccaactggntctatccggcgggcgatgtcacgctgccggaggcgttcgccaaactgccgcgtccgcagaagtcgttgcagttcaccccggacgaggtgcagaaaaaccgtccgcagtggattgagcaatggcagaaggcggtaagccaataagtcccgtggcgcgcaggggttgcccctgcgcgttcttttttaatctaaaggctcacacatgaatcccgtaccaaaacnnctgttcctcgcgcttgccctcgccgccgcaagcgcccacgccatcncctgcccngccccgntngaagtnccgnaaggcgaaggcatcgaanccnctnnccncgtctgcggcgcnntgggcgtcttnanccancacggcaaaaaaggcttctttgacccgnacancggcgngntngtcgtccccgcncantttgacgncgtgtncnncgantacgtcgccgataccctgacgccggtgangaaaggcgaacactgggcttacgtcgatacccaaggcaaggcgnnnaccgcctnggaatnngannaagtnnnncngttcnncnacnacgacanantcnncnncgnnngcaannncgngnncnnnnnnannannnnccnnnacgnngnaanngncgngcngnngnaanncnancncnngnacnnnnncnnncgnnngnnnnncngnnnnaacnncnncaccgtcgccnncnaancggncnnanncngcnncctngncgnnannngcannnncntcntnncncncgnntacgncnnngcnngcngnntnggcgcngncntnnnccccgncnnannnngcgncanntngggcnannncanncnncnngncnnnnncgtgcannccnncgannncnnngcagccnnngccntcnnccncnacnnnnngnncngccnnnncnnnnncnncnnngnngcnannannnncnncnnncnngcggnnnnnnncncnnnnnncnncnnccnngnnnnnnannncngcnnnnnnnnncngccnccncnnnnnnnnnnnnnngnnncnnnnnnncnnnnnnnnccnncncnnnnngcnnncnnnnncntnnnnnncnngnncnnnanncnnngcnnncnnnnnnncnnnnnncnnnnnctcnncgncnacnnncnnnncnnccccnncnncctcnccgnnntnntcnnnntccnccnnnnnnnnnncntnnnnnncncnnnnnnccncnnncncnncnncnnnnnnnnnntncncnncgnnnnnnncnannnnnccnncnnnnncnncntnnncnncnnnncnnncntnnncnncnncnnnnnnncnnnncnnngccnccnnnnnnnnnncnncgnnnnnntnnncnncnnnnncnnnnnnnncnncnncnnnncnnnnctcnncnncnncngcngcnnnnnngnnnncnncnncnnannnnnnnnnnnnnnnnnnnnnnnnnnnncnnncgnnnncnnccgnnncnnccnnnncgncnncnnnnnnnncnncnncnnccncnnnnncntcnncnncnnnnnnnccnncnncnnnnncctnaacancntccncgnncncnnccgcnncnnncncnnnnnccnnnncgncnnnnnnnnnnnccnngncgncnncntcctnnncnncnnnnnnnnnnnntnncnncnncnncnnctnnncgccgncnncntcnncnnnnncnncnnnnncntgnncnnnnncannngcnnccncnncctnngncgcgncannnncnccncnnnnnncntngncnnnnccgnngnnctnntcancctcnccntcnnccnnntnctcntcnnnancngccncgnnctncncntnngcngccnccnccnncncgncnacctncncgaanncnnnnncannctcnncnncnccntgcncggcntcnnccncnccnncnncntcnnncnccncnngnnncncnncnncgncnncnncnnccacnncnncnncctcntcntccncnncnncnnccnnnnnnncntcnncnncnncntnnnnnncnncnncnnncnnnngnnngncntnnncnncnncnncnnnngcnncnncnccnncnncnncntgcgcnncntcncccnc

SEQ ID NO: 1660 - DNA, 4000 bp, Escherichia coli
  misc_feature (2218)..(2218): n is a, c, g, or t
  misc_feature (3139)..(4000): n is a, c, g, or t
aagatagcgcagaaatcccctatgtgcgtttgtcacggaaccttgtcctcctgccaaaaaccaagtcagacactgtgaaaggcgtttttctctcgatagagacagaaaagcctcctgtttggtttgaacatatgatcgtttcagccaagacacttgatctggctgatcggttgttgactctgcttgaggatttcaaacggatagatacgatccagtcagatttggattcatcagctttgcgtcttttgtttttgcatcactggcggaaaatggcactcagggagtcaacttgggcgcatatttggctcaacaaagatagtccgattgctcgatgtcatatcggcgtaacaacgattctttcaacgttgccgaaatttggaatgcttcagaaagcgcattgaagggcaacactctgttaatcagagtggatgcatgataagagctttcaggtaagggtgtaagacggagcacgacatgaaccagcaaattattatgccaaaaaggccgtcggagacatgcgaagttgaagcgacaatcgcaattatcgcaggcaaatggaaacctatgatcctgtttaatctgcggctcggtgcgttgcggttttccgatataaaaagagccctgcccaaaacatcggaccgcatgctcattcggtcgctgcgggaattggaagaggacaatcttatcagtcgcgaagttttcaaagaggtccccgcgcgcgttgaatacgaactgacggtccgtggcaaaagccttctgccggtgcttgacgtcatgagcaaatgggccgccacagaacatgggattgcctgacgcgggcgaaatagccaaaactaaaacacattagccagcttttttgtcgacatggcgcaggttaatttgaccaatcccatgctgctaaggtgccccacaaatgggtacaccttaactttttgattgtgatgatatgtcagagaggtcttgtttgttcccggtctccaaaggtcacatgtcaatctgcataccaacggctatggggacgaccttatcaccgaacttttgttcaagcgcgttggtggcccgccaaccggtacaatgcccgggaaggataagatcaatgtcaaattgggcaaaatcttcgaccgtttgatcgatgattttttcgttcgcaccagacaggtgatatcctccgatcaggctgtggaatgggatatttccaaaatctttgcgcgcggcatgcatgacattgacaatcccggcatgcgaacaggcagaaaaaattacaggacctttgtttttaatattcacggcaagatagcgttcatccataatcagcggatcaggttcccattcttttccatcctctgagcgccgcatatgccccggaaaccccacctcatagggggtcacccgatcaatttctccgctgacaaagaacatatcgttaagaacattcatcggtttgtctgtgatcacaggtttcccgtttttggcctttatatcctcagggtttgggatttctttaattggcaacagatcttctccggggagcggcaatgccctttggcgaaacatgcccggatgaaggtatacgggtacttcttggttattgttttgttgcatgatcagatcaagcgccattggtaggccaccggcatgatcccaatgtccgtgtgacaacataatcccgtcaatttcaccaaatttcgcaccgaggcgagtcccgttatattcgaccgcaaattcaacggggccggcgtcaaacaatatggttttactttcctccccaatccacgcctttacaatcaaggcaagcccatgattggcgcaacattggcagctcccgcttagctgttccataccggcttttctcaggttgctccattcagaggtaaagttggcaggtgttgtcgacaaactgtcggtcttattatcgatcaagaccgttatctctattccatcaacttcacgaagtccgtccgtatccatcaccgtatccctttttctattactttctatctaatgataggtagataaatgagtatccaacagccgtcaacctcagaatttgatgaacgaaatgaaattgtgctggcctgcacgcatggaatattatggcttaaaccgagccaagtctatgtttgcatcgggttgaaacgttcatccacgcagtagcttaaaggaagcacctcagggctggtatttccgctatctggcagataaaccgcccgtccatttntgttaaaacgggtgaacgtttgtgccagttggcagagggcagaggccatatcggtccgggccacaaaatgccccaaacaatgatgtgcgccgccgccaaatccatgatgccgtttctgacgggcctgaatgtcaaattctcccacaggcccaagggctggatctttggcgcttgcatgcaccaagagatgcacagtggcacctttgggaaacggtactccgtcaaattcgaacgcttcggttgtttcccgcgtggcccaagtggtggtgggccatgcgcgaatagcttcttcgatggcgtttggaacaaggcgcagatcccgccgcaggtctgtccattgttccggataacgggcgaaaagtgcaatcaagaaccccaattggctccgcgtggtgtccacaccaccaaaaatcatgatgacgatgagatcgattaaatcttgatgtgaaatatcttttacgggatctttgaaggatattagccgccccaccaaatccttttgcgatctttgtgtctttgcgcgcgcgatcaattgctccgcaagagccattagccgatcgcaggcagcatttacctttgcctcatgggttttgtagtgcaaacccattgcaagccccaatgtgcttgcatcccctgcaactgtctgccaatcgctgcggggaagtccaagcagcgtgcaaattgcctgacccgaaaagggcatcgcgaattcagtctgaaattcacactgtctcttttccgcaagggataggcacagatcgcgcgcgatctcatcaaagctgggcacaagcgagagcacaaaatcttcgtccagcgcctttatcgctaaggcgcggattgttttgtgtttcggtccttccaaagaaattaaactgcgttgccaaaattctgcaaaactacctttggcattttgggatctgnnnnnnnnnnnnnnnnnnnnnnnnnnnnnnnnnnnnnnnnnnnnnnnnnnnnnnnnnnnnnnnnnnnnnnnnnnnnnnnnnnnnnnnnnnnnnnnnnnnnnnnnnnnnnnnnnnnnnnnnnnnnnnnnnnnnnnnnnnnnnnnnnnnnnnnnnnnnnnnnnnnnnnnnnnnnnnnnnnnnnnnnnnnnnnnnnnnnnnnnnnnnnnnnnnnnnnnnnnnnnnnnnnnnnnnnnnnnnnnnnnnnnnnnnnnnnnnnnnnnnnnnnnnnnnnnnnnnnnnnnnnnnnnnnnnnnnnnnnnnnnnnnnnnnnnnnnnnnnnnnnnnnnnnnnnnnnnnnnnnnnnnnnnnnnnnnnnnnnnnnnnnnnnnnnnnnnnnnnnnnnnnnnnnnnnnnnnnnnnnnnnnnnnnnnnnnnnnnnnnnnnnnnnnnnnnnnnnnnnnnnnnnnnnnnnnnnnnnnnnnnnnnnnnnnnnnnnnnnnnnnnnnnnnnnnnnnnnnnnnnnnnnnnnnnnnnnnnnnnnnnnnnnnnnnnnnnnnnnnnnnnnnnnnnnnnnnnnnnnnnnnnnnnnnnnnnnnnnnnnnnnnnnnnnnnnnnnnnnnnnnnnnnnnnnnnnnnnnnnnnnnnnnnnnnnnnnnnnnnnnnnnnnnnnnnnnnnnnnnnnnnnnnnnnnnnnnnnnnnnnnnnnnnnnnnnnnnnnnnnnnnnnnnnnnnnnnnnnnnnnnnnnnnnnnnnnnnnnnnnnnnnnnnnnnnnnnnnnnnnnnnnnnnnnnnnnnnnnnnnnnnnnnnnnnnnnnnnnnnnnnnnnnnnnnnnnnnnnnnnnnnnnnnnnnnnnnnnnnnnnnnnnnnnnnnnnnnnnnnnnn

SEQ ID NO: 1661 - DNA, 4000 bp, Escherichia coli
  misc_feature (826)..(826): n is a, c, g, or t
  misc_feature (843)..(843): n is a, c, g, or t
  misc_feature (1230)..(1230): n is a, c, g, or t
  misc_feature (1670)..(1670): n is a, c, g, or t
  misc_feature (3863)..(3863): n is a, c, g, or t
tggcagctcttctctggtggaaaaccaataatgcagtacagtttccattgtttaagactgctaaacgctctatgtcatcgtgccattacaggcgaaataaattgaaattgatttatgatctatggccgtaacccttggggcaaaaatatcatttacgttctctgaaaatcaaacgtacttcgctcccgctatgattttagtgttaaaggtacactcatgagtaaatatgcaacggatttaggcgaaaatatcccttgggtaatagcaagcactttttgcggctttagcgtcgatgataaaactattcgtgccgcctacgatgacacaggcggtgaggttgacgactttaatgtgaaggcaccgtccaatccgcttttcgtaagtaacggcttcacggatggacggttacctcggtccgtcaagtacatgacccatcgcacattttaaaaagcggggggggaccgccctcgtctaatgtaggcgatcttgcgtctcaggttaaaaagatagacgtttctggcaatttgcttcacggtaatgtgaatggatcgaccgcagcccacataaaaatgctgcgtggcattgccatgaagtatccccgcagttcaaccgttcgtaaatgggtggcgacatgtatggtcgccaaatcggctaaagcgggcatacgtggaactaagttagttggggcggctattcccattggagcgttgggtatggcaacaaatgtcatcacaaatttagggcgtgcgggtgtgcggatgaattactgaaatgtcgttaacagggttgctatggagctgtactggcgtgcaaacgtcgaaatgtnactttcgggtgtcggtngtggaaaaattacaacaaaggtaaatggtccggctagtgcaatcatgtgtgagattttccgtcgccgtggccccaccgggttctttggtcaatgtgatgtcactaacattatttcggaatccggtggttggttcgctttgcgcgctaagttactttgatgtaataatccaacagtttctgcaagagaggtcgcaaagaagtattgcaaaccaagcgtatcatatggagagggcaaccagcggctgaacgcgtttctggcaacttgtcagaacgagaacgacttaaccgtgagtacgagatgttgacgctttttggcggcactcaggcgcctaaagttttgtgctacgaaaatattgcaggctcagtccgtctcgtccgaagttggtnagaaggttctacgctggatcaagtaccgcgctgcgaaagggctcagattatcgcaagattgcgcgatatgctcaggaaaattcatgaagctggctggattcacggtgatttgaagcctgagaacattatttctgcttcaactgggccggttttgattgactgggagcatgcagcacctattggggctgaggtaagacgactttccgcccgtgctgtgaccgtcggtatgacacaccctgacttgatttggggacgtggatctgttcggagaagatttgatttctatgccttagaccaaattgcagcagtatcgatcgattgtagttgttgactagcactccggtagttttgagatgccatgatcctgcatttcctggccgcctacagccggctctatcagacaaagctacttaacatcggacgagcaactttatagcgtnttgtaactaagaaacattcttcatttgttactttaaacttggcctggggtctccgatccatcctgccgaggatcggagaccaagacctatgggtcccggacaatagagtagccaacgacgtccagcctatcgtgttgccgaaactcaatttgcatcggatggttttgttcttccccatcgcaccacttaagttacttcattaaaatatctgataagggttgttgcctttagctccagtccaacaaccaaaatgcccatacttgggattctagttctcgtttttggagagtgtccacagagcgcatttaattgtagagatctaggcctgcggcgaccggtctcggagggctcaatgtatccgtcctatgccccacgctaggcacactgaattattatcatactttctgtctaggagttggctttggcattaataattaaaatttaaataaatgtattaaacgcgagatatacatgatggataaaatattttcacttgaaccgtatgaaatcatcaacagagaggctgtctttcggcattgcccaaatcaggcccttgcgcgttttctgccccatgttgctgttaagtcgttacagtcaggcgatgaattacaatacgccggtcagacagcgaagttcgtatatttaattgtttccggcacgtttgaagccgctagcgaaggcggtcaaaaagtcaacgtcaagtcaggttttttgggtcaagaggcggcgataggtatggatttaaatatcgttactgcggtagcgacgagtgggtctagcgttttagtcatcccaaaggctgcgatttgggaactgagtaagtaccctgaatttcaccaagacctactcaattcgtttacttcgttgtttggcagagaacctaaggctgtagaagacgaagaaaactctaatgacaaaaagagctactcaagtgatttgaggatcttttttggttggcttatggcgttactggtaccgctaagcatgattgcgggcgttgttgaattctcgagcatccccaataaagagtcattatatttggttgccatcctttccacatccatagttatgtggatatttcgcttactgccagattttgtaccggctcttttttcggttttaggcattgttttgtttggccttgcaccttccagtgtcgttttggcaggctttggctcgaaaaccttctttatggcgctgagtatttttggtctgtctgctgtaattgttgtctcaggcctcagttataggattttactcctactgttaaaaatcggccccgcaaacaagacctggtactatatgtgtctgtttttatctggctcattattaactcccatcgtcccaacaaccaatggccgtgtgtcaatcgtcaccccgtttatgaaggatcttttagcctcgtttgatgaaaagtcagccaaggcagaagcgccacgattgtctgcagcggtgctcggcgggaccagtttattatcagcgattttcctcagctctaagtctgtgaacttccttgtttttggtcttatgccgtttcaagaacaaacccgattccagtgggtggactggttcgtcgcagcttcagttagtggcgctgtattattggtgctgtattctttagccagttggttgatatttaaaaataaagaaagaccagcgattccaaaggctctggtctgtgatcagctcaaaattttaggacctccctgcgccagcgaatgggcaggtgttgctggtttgttagtacttttggttagcttcatgacagtggcgatccaccatattgaaattccttggatcgcattggctatattgtttagtttgttaatgtttgggttcttggataaacaagaatttttgacgcggattgactggaacttcttgatttttttgggctcgttagttggccttgtttcgtccatggaatatgtggggttagatgtgtggctaaccgaaaaactgtcatggcttaatcattatatggccaacgaattcggcatgtttattgtcttgctgtcggtatcaatttttttggttagattggcgatcccgatcaacgcgacggtggtcatctttgcaaccttattaatgccggctgccataaacatcggcataacaccctggattgtgggctttatcatcctgttgactgccgaaggttatatctggccctatcaagcctcatattattcncaattttgctcgttagccggtccaaaatctggtgccgacagcaaaaaagtaatcatattaaatgcgatgcaatatgcatttaagttggcggctatttatgcgtcaatcccgttttggcaatatttgggactgctctg

SEQ ID NO: 1662 - DNA, 4000 bp, Escherichia coli
  misc_feature (4)..(7): n is a, c, g, or t
  misc_feature (11)..(15): n is a, c, g, or t
  misc_feature (17)..(17): n is a, c, g, or t
  misc_feature (20)..(20): n is a, c, g, or t
  misc_feature (23)..(23): n is a, c, g, or t
  misc_feature (25)..(25): n is a, c, g, or t
  misc_feature (27)..(28): n is a, c, g, or t
  misc_feature (31)..(32): n is a, c, g, or t
  misc_feature (37)..(37): n is a, c, g, or t
  misc_feature (39)..(39): n is a, c, g, or t
  misc_feature (43)..(44): n is a, c, g, or t
  misc_feature (46)..(48): n is a, c, g, or t
  misc_feature (50)..(51): n is a, c, g, or t
  misc_feature (53)..(54): n is a, c, g, or t
  misc_feature (56)..(56): n is a, c, g, or t
  misc_feature (59)..(60): n is a, c, g, or t
  misc_feature (63)..(66): n is a, c, g, or t
  misc_feature (68)..(75): n is a, c, g, or t
  misc_feature (77)..(78): n is a, c, g, or t
  misc_feature (81)..(83): n is a, c, g, or t
  misc_feature (85)..(86): n is a, c, g, or t
  misc_feature (88)..(90): n is a, c, g, or t
  misc_feature (92)..(92): n is a, c, g, or t
  misc_feature (94)..(95): n is a, c, g, or t
  misc_feature (97)..(99): n is a, c, g, or t
  misc_feature (101)..(104): n is a, c, g, or t
  misc_feature (106)..(107): n is a, c, g, or t
  misc_feature (109)..(110): n is a, c, g, or t
  misc_feature (112)..(112): n is a, c, g, or t
  misc_feature (114)..(118): n is a, c, g, or t
  misc_feature (121)..(123): n is a, c, g, or t
  misc_feature (126)..(132): n is a, c, g, or t
  misc_feature (134)..(134): n is a, c, g, or t
  misc_feature (139)..(140): n is a, c, g, or t
  misc_feature (142)..(142): n is a, c, g, or t
  misc_feature (147)..(148): n is a, c, g, or t
  misc_feature (150)..(150): n is a, c, g, or t
  misc_feature (152)..(152): n is a, c, g, or t
  misc_feature (154)..(154): n is a, c, g, or t
  misc_feature (156)..(157): n is a, c, g, or t
  misc_feature (161)..(163): n is a, c, g, or t
  misc_feature (166)..(167): n is a, c, g, or t
  misc_feature (170)..(170): n is a, c, g, or t
  misc_feature (175)..(176): n is a, c, g, or t
  misc_feature (184)..(188): n is a, c, g, or t
  misc_feature (194)..(195): n is a, c, g, or t
  misc_feature (199)..(204): n is a, c, g, or t
  misc_feature (207)..(208): n is a, c, g, or t
  misc_feature (211)..(212): n is a, c, g, or t
  misc_feature (214)..(215): n is a, c, g, or t
  misc_feature (218)..(218): n is a, c, g, or t
  misc_feature (221)..(224): n is a, c, g, or t
  misc_feature (227)..(227): n is a, c, g, or t
  misc_feature (230)..(231): n is a, c, g, or t
  misc_feature (235)..(235): n is a, c, g, or t
  misc_feature (238)..(238): n is a, c, g, or t
  misc_feature (240)..(241): n is a, c, g, or t
  misc_feature (243)..(243): n is a, c, g, or t
  misc_feature (245)..(246): n is a, c, g, or t
  misc_feature (248)..(254): n is a, c, g, or t
  misc_feature (258)..(259): n is a, c, g, or t
  misc_feature (262)..(263): n is a, c, g, or t
  misc_feature (265)..(265): n is a, c, g, or t
  misc_feature (267)..(267): n is a, c, g, or t
  misc_feature (269)..(271): n is a, c, g, or t
  misc_feature (274)..(276): n is a, c, g, or t
  misc_feature (278)..(282): n is a, c, g, or t
  misc_feature (284)..(284): n is a, c, g, or t
  misc_feature (288)..(290): n is a, c, g, or t
  misc_feature (292)..(297): n is a, c, g, or t
  misc_feature (301)..(305): n is a, c, g, or t
  misc_feature (307)..(307): n is a, c, g, or t
  misc_feature (309)..(311): n is a, c, g, or t
  misc_feature (316)..(317): n is a, c, g, or t
  misc_feature (319)..(329): n is a, c, g, or t
  misc_feature (332)..(332): n is a, c, g, or t
  misc_feature (334)..(336): n is a, c, g, or t
  misc_feature (339)..(342): n is a, c, g, or t
  misc_feature (344)..(345): n is a, c, g, or t
  misc_feature (347)..(349): n is a, c, g, or t
  misc_feature (354)..(356): n is a, c, g, or t
  misc_feature (384)..(384): n is a, c, g, or t
  misc_feature (398)..(399): n is a, c, g, or t
  misc_feature (407)..(407): n is a, c, g, or t
  misc_feature (430)..(430): n is a, c, g, or t
  misc_feature (438)..(438): n is a, c, g, or t
  misc_feature (449)..(449): n is a, c, g, or t
  misc_feature (512)..(512): n is a, c, g, or t
  misc_feature (515)..(517): n is a, c, g, or t
  misc_feature (524)..(524): n is a, c, g, or t
  misc_feature (532)..(532): n is a, c, g, or t
  misc_feature (565)..(565): n is a, c, g, or t
  misc_feature (582)..(582): n is a, c, g, or t
  misc_feature (634)..(634): n is a, c, g, or t
  misc_feature (642)..(642): n is a, c, g, or t
  misc_feature (701)..(701): n is a, c, g, or t
  misc_feature (707)..(707): n is a, c, g, or t
  misc_feature (713)..(713): n is a, c, g, or t
  misc_feature (720)..(721): n is a, c, g, or t
  misc_feature (724)..(725): n is a, c, g, or t
  misc_feature (728)..(728): n is a, c, g, or t
  misc_feature (732)..(733): n is a, c, g, or t
  misc_feature (752)..(752): n is a, c, g, or t
  misc_feature (754)..(754): n is a, c, g, or t
  misc_feature (757)..(757): n is a, c, g, or t
  misc_feature (761)..(761): n is a, c, g, or t
  misc_feature (764)..(764): n is a, c, g, or t
  misc_feature (767)..(767): n is a, c, g, or t
  misc_feature (769)..(769): n is a, c, g, or t
  misc_feature (771)..(771): n is a, c, g, or t
  misc_feature (773)..(773): n is a, c, g, or t
  misc_feature (802)..(802): n is a, c, g, or t
  misc_feature (835)..(835): n is a, c, g, or t
  misc_feature (857)..(857): n is a, c, g, or t
  misc_feature (902)..(902): n is a, c, g, or t
  misc_feature (905)..(905): n is a, c, g, or t
  misc_feature (908)..(908): n is a, c, g, or t
  misc_feature (913)..(914): n is a, c, g, or t
  misc_feature (917)..(917): n is a, c, g, or t
  misc_feature (921)..(921): n is a, c, g, or t
  misc_feature (928)..(929): n is a, c, g, or t
  misc_feature (940)..(941): n is a, c, g, or t
  misc_feature (944)..(944): n is a, c, g, or t
  misc_feature (947)..(947): n is a, c, g, or t
  misc_feature (961)..(962): n is a, c, g, or t
  misc_feature (968)..(968): n is a, c, g, or t
  misc_feature (973)..(973): n is a, c, g, or t
  misc_feature (977)..(977): n is a, c, g, or t
  misc_feature (1025)..(1025): n is a, c, g, or t
  misc_feature (1031)..(1032): n is a, c, g, or t
  misc_feature (1037)..(1037): n is a, c, g, or t
  misc_feature (1039)..(1040): n is a, c, g, or t
  misc_feature (1043)..(1046): n is a, c, g, or t
  misc_feature (1058)..(1058): n is a, c, g, or t
  misc_feature (1069)..(1069): n is a, c, g, or t
  misc_feature (1075)..(1076): n is a, c, g, or t
  misc_feature (1377)..(1377): n is a, c, g, or t
  misc_feature (1990)..(1990): n is a, c, g, or t
  misc_feature (3753)..(3753): n is a, c, g, or t
  misc_feature (3882)..(3882): n is a, c, g, or t
cctnnnnttannnnngnaanttngncnnaannttttncntggnntnnntnnannantcnntgnnnntnnnnnnnncnntgnnnanngnnntnannannntnnnnanngnngntnnnnnttnnngtnnnnnnnanttttnnancgacnntnancntnncaannnatnnaanaaagnnatgaaaannnnnatgganntacnnnnnnaanntgnntnnaanaannnnttnaannaagntgncnntnanncnnnnnnnaagnnaannananannnaannnannnnncnaaannnannnnnnaatnnnnnangnnntttgnnannnnnnnnnnnacngnnnaannnntnnannnttttnnntttctttttcttcggatatatacaatgnttccaactattatnncaccaatnattgctaaaacaatgccagtgtntgatgtancctcagagctngcttctatctcggaaataggaacggttggaagttcagtttgtccttcaactacgagaaaactngtnnnatagatntcaggtcntaatgcttcatctgatgaggcaaagatcttcancgtatttgctccaacancaagctgtgaagtttctgcttctgttagtacaatttcagacaaattgttgtnaactggtntgatgcctgatgcagaagtttcgcctttaggatttgagatgaaataatggattgcagangagtcngttgtntgaactnnaannganagtnnttttttcaaatccacaacntntgnaatntcnacntnantnatttttggaaatttaatttgctcaaactntttccacttgccagcctcaaaaggatatcctantgaatcaaatgactttatggtnatggttcttgattcaggggaatagttatcgagataaaatggtccnttnctnattanngcntgtntgttttnntcaatccattnnatngcngcatcatagcgttnntcaaantattnccantcatgttgtgaattttgtaatgatggtggaatgtatcttgattctttnaattcnncaagntnntcnnnnattatttttgcntcgtttggaanaatcanngaaagccagtttacgctcttgctaattccgccagaacgtgaaaaagataccttaccatcaagaacagcctcttccgaagcagccacaatctcccaaggcatgctgctccaaggggctgcccacgaagctatttcagcttcatcaaaatgccaataatcaacataaacctcaatagtgtcatcatcaattggctttattccaattagcgtttttgcattttgcgcagcctgcggagaatatacagaatcatatgtaatatcaccttcgtgcttttcggaaccccattcaagtaaaaaatacngagagtacagtatgtcattcatgtccatcttttgttcatggtgccagttaccaagaataagatcataggtaaccttgcttgtagcctcttggttacttcccacttttttccatacttgagtatctatgtcccatgaaatcgcatcttcaggaactgtgatttttttgtcactactaaaattttcaacttgccaatttgtacgaattggaatcatcttcccagtaaatgggtgactaaaaactccaggatcataaaggtttagccatatttggttactgtatacatcactaaatccggcaactgggttccatgctccctgatagatttgtttgacacctataaccagtgaatcattgtcagattttgcgttaattggagtaaatctggttggaacacctgcgccaagagcgttgataattccatcaatatcatcattgacaacgtactggtctgtcttgctggcaagaaaaatcctaacagattcactgacaccttcctttgttgcttgtttaattaacgaagttctttcttcagcagatgcaaaatcactaacatagatttttttggttatcgagtctagatagtcatttttgtaattccagtaggtaagatngttatttccaggcatattagaaaaccaaggcgaatacatttgcgctagcccaactgaatcgtattttgcaaatcctgagctgccccacccctcagtgtaaagatgccatttttgatccgcaggatttgaaccataaacaacaacaaacgccttgttaagatctccaaagtctttgtttactttgaaaccaatattttcaaactctgatgataggatctcaccgattgattttcttacaggatcatcacttctaataaaaaatgtaatttcaatttgttttccattatgatgccagaaaccgtcaattttttcagcaccggctttttcaagttcctctgaaattattttattagctaatgctggattgtatttgaaatgaaatgattcaagttcgtcaatgatggaaagatagtcagccgcaaatattccataatttgaaatcatagtattgccataaccacctataagttcgttaacaattagatttctgtctacaagatagttcaatgcaaatcttaactcggtaattgaaaacgggttgaatgtttcagaaatagatgggttcaccagcatgctatatgagccaccagtagattcaaaaacttgaatgccttccctatctttttccgtctcaattctatctgaggaaacccgaaaatagtatatgtctagattgccgttccgaacttcttcaagtgctgtattttcgtccaaatactggatgaatttaacctcattcacgaacgttcctttttcagcaaatgatgtatgcagcataaatgatggtagtaatacgagtaatgctagtatagtaactagccaaaatttcatggcaaacatggtgtgttatcataatttaaggttcattaagctttaacaaaaaatctatgcagtgatttttttatggaaaacaaattgaaaactgcacttttggctataaagactggagtaccgattgaagaggcttcacgttctgttgattggaaagactttgagggtcttgtagctgagatactagaatcaaaaaactttgaagttttacgtaactttaggatgaagaagccaacaatggaaatagatgtagttggaatacgtcttggtacggcattacttattgattgtaaacattggaagaggatgagcaattctgcgcttgaaaaaattgttctaagacaaatagatcgtgtaaaacattatgtaaaaacaacaaatgaagctgtagctgccccagttattgtcacattatatcaagaggaaactaggtttatcaacagagtccctatcgttccaataatgcagttttcttcgtttattgatgaattttatggaaacttggaagagattagaaccatagaaaaatagacaataagaaaattccagtgcacaaaatcataaatccctgcgtcatcttcaaagaactatcgagtgccctagaaagatgctcaaaaattcctgagcccataatcctgactcttgcactattttctaaaatttcaaatttgcctgaagcgatatttttttccgcttgccttgcaatagacaggcaccagcttgctaatctttctgatttggtaatactaccaagctcatagtaaccatttctgtttcttactcccattgttgtggagtgtgtatcagaagtaaacatttcaactaattcacagccgttgttttttagatgtgttacaattttttcacgtacgccgttttccatattgttagcatctgcccaacacagaaagtatttcttttgatcaaaagcnaggcaaagcatacctataccaccaccagcaagatcactggtttgaatatccatagattgtgaatttgcatagccatattgcaatggatggttggtttttgtaatgagaatttcaagtacattttttgcngcagtgatcaaatcttgcgagtcttcttgcgatatctctcctcccatagcattgtgagtatcagcgatcaatatacgctggaaatttctgttttttgctatttgctcaatatctgtct

SEQ ID NO: 1663 - DNA, 4000 bp, Escherichia coli
  misc_feature (1)..(2): n is a, c, g, or t
  misc_feature (4)..(5): n is a, c, g, or t
  misc_feature (7)..(8): n is a, c, g, or t
  misc_feature (10)..(10): n is a, c, g, or t
  misc_feature (14)..(14): n is a, c, g, or t
  misc_feature (17)..(20): n is a, c, g, or t
  misc_feature (22)..(22): n is a, c, g, or t
  misc_feature (24)..(24): n is a, c, g, or t
  misc_feature (26)..(28): n is a, c, g, or t
  misc_feature (30)..(42): n is a, c, g, or t
  misc_feature (44)..(58): n is a, c, g, or t
  misc_feature (60)..(61): n is a, c, g, or t
  misc_feature (63)..(66): n is a, c, g, or t
  misc_feature (68)..(76): n is a, c, g, or t
  misc_feature (78)..(82): n is a, c, g, or t
  misc_feature (85)..(95): n is a, c, g, or t
  misc_feature (97)..(101): n is a, c, g, or t
  misc_feature (103)..(108): n is a, c, g, or t
  misc_feature (110)..(110): n is a, c, g, or t
  misc_feature (114)..(118): n is a, c, g, or t
  misc_feature (120)..(122): n is a, c, g, or t
  misc_feature (124)..(125): n is a, c, g, or t
  misc_feature (130)..(131): n is a, c, g, or t
  misc_feature (134)..(134): n is a, c, g, or t
  misc_feature (136)..(136): n is a, c, g, or t
  misc_feature (138)..(138): n is a, c, g, or t
  misc_feature (140)..(148): n is a, c, g, or t
  misc_feature (151)..(153): n is a, c, g, or t
  misc_feature (159)..(159): n is a, c, g, or t
  misc_feature (161)..(167): n is a, c, g, or t
  misc_feature (169)..(180): n is a, c, g, or t
  misc_feature (182)..(185): n is a, c, g, or t
  misc_feature (187)..(193): n is a, c, g, or t
  misc_feature (195)..(200): n is a, c, g, or t
  misc_feature (202)..(205): n is a, c, g, or t
  misc_feature (207)..(209): n is a, c, g, or t
  misc_feature (211)..(212): n is a, c, g, or t
  misc_feature (214)..(217): n is a, c, g, or t
  misc_feature (219)..(219): n is a, c, g, or t
  misc_feature (221)..(222): n is a, c, g, or t
  misc_feature (224)..(227): n is a, c, g, or t
  misc_feature (229)..(233): n is a, c, g, or t
  misc_feature (236)..(238): n is a, c, g, or t
  misc_feature (240)..(247): n is a, c, g, or t
  misc_feature (249)..(256): n is a, c, g, or t
  misc_feature (258)..(259): n is a, c, g, or t
  misc_feature (261)..(262): n is a, c, g, or t
  misc_feature (266)..(269): n is a, c, g, or t
  misc_feature (271)..(272): n is a, c, g, or t
  misc_feature (274)..(277): n is a, c, g, or t
  misc_feature (279)..(279): n is a, c, g, or t
  misc_feature (282)..(284): n is a, c, g, or t
  misc_feature (286)..(289): n is a, c, g, or t
  misc_feature (291)..(295): n is a, c, g, or t
  misc_feature (300)..(301): n is a, c, g, or t
  misc_feature (304)..(304): n is a, c, g, or t
  misc_feature (307)..(310): n is a, c, g, or t
  misc_feature (318)..(318): n is a, c, g, or t
  misc_feature (321)..(325): n is a, c, g, or t
  misc_feature (327)..(327): n is a, c, g, or t
  misc_feature (329)..(329): n is a, c, g, or t
  misc_feature (331)..(331): n is a, c, g, or t
  misc_feature (335)..(335): n is a, c, g, or t
  misc_feature (339)..(339): n is a, c, g, or t
  misc_feature (343)..(347): n is a, c, g, or t
  misc_feature (349)..(352): n is a, c, g, or t
  misc_feature (354)..(357): n is a, c, g, or t
  misc_feature (359)..(360): n is a, c, g, or t
  misc_feature (365)..(365): n is a, c, g, or t
  misc_feature (370)..(370): n is a, c, g, or t
  misc_feature (374)..(374): n is a, c, g, or t
  misc_feature (381)..(382): n is a, c, g, or t
  misc_feature (384)..(384): n is a, c, g, or t
  misc_feature (386)..(388): n is a, c, g, or t
  misc_feature (390)..(390): n is a, c, g, or t
  misc_feature (392)..(396): n is a, c, g, or t
  misc_feature (398)..(399): n is a, c, g, or t
  misc_feature (405)..(407): n is a, c, g, or t
  misc_feature (410)..(412): n is a, c, g, or t
  misc_feature (415)..(416): n is a, c, g, or t
  misc_feature (418)..(418): n is a, c, g, or t
  misc_feature (420)..(424): n is a, c, g, or t
  misc_feature (426)..(426): n is a, c, g, or t
  misc_feature (429)..(430): n is a, c, g, or t
  misc_feature (432)..(432): n is a, c, g, or t
  misc_feature (434)..(434): n is a, c, g, or t
  misc_feature (440)..(442): n is a, c, g, or t
  misc_feature (445)..(446): n is a, c, g, or t
  misc_feature (448)..(449): n is a, c, g, or t
  misc_feature (451)..(451): n is a, c, g, or t
  misc_feature (455)..(455): n is a, c, g, or t
  misc_feature (457)..(457): n is a, c, g, or t
  misc_feature (459)..(461): n is a, c, g, or t
  misc_feature (467)..(468): n is a, c, g, or t
  misc_feature (472)..(472): n is a, c, g, or t
  misc_feature (475)..(478): n is a, c, g, or t
  misc_feature (481)..(482): n is a, c, g, or t
  misc_feature (485)..(485): n is a, c, g, or t
  misc_feature (488)..(488): n is a, c, g, or t
  misc_feature (490)..(491): n is a, c, g, or t
  misc_feature (494)..(494): n is a, c, g, or t
  misc_feature (496)..(497): n is a, c, g, or t
  misc_feature (503)..(503): n is a, c, g, or t
  misc_feature (505)..(505): n is a, c, g, or t
  misc_feature (507)..(507): n is a, c, g, or t
  misc_feature (510)..(510): n is a, c, g, or t
  misc_feature (512)..(519): n is a, c, g, or t
  misc_feature (521)..(521): n is a, c, g, or t
  misc_feature (524)..(526): n is a, c, g, or t
  misc_feature (529)..(529): n is a, c, g, or t
  misc_feature (531)..(532): n is a, c, g, or t
  misc_feature (534)..(535): n is a, c, g, or t
  misc_feature (537)..(540): n is a, c, g, or t
  misc_feature (542)..(546): n is a, c, g, or t
  misc_feature (549)..(550): n is a, c, g, or t
  misc_feature (554)..(554): n is a, c, g, or t
  misc_feature (556)..(559): n is a, c, g, or t
  misc_feature (563)..(566): n is a, c, g, or t
  misc_feature (569)..(569): n is a, c, g, or t
  misc_feature (572)..(572): n is a, c, g, or t
  misc_feature (574)..(576): n is a, c, g, or t
  misc_feature (578)..(580): n is a, c, g, or t
  misc_feature (583)..(584): n is a, c, g, or t
  misc_feature (586)..(586): n is a, c, g, or t
  misc_feature (588)..(588): n is a, c, g, or t
  misc_feature (592)..(595): n is a, c, g, or t
  misc_feature (598)..(600): n is a, c, g, or t
  misc_feature (603)..(606): n is a, c, g, or t
  misc_feature (608)..(608): n is a, c, g, or t
  misc_feature (610)..(610): n is a, c, g, or t
  misc_feature (614)..(615): n is a, c, g, or t
  misc_feature (617)..(619): n is a, c, g, or t
  misc_feature (621)..(621): n is a, c, g, or t
  misc_feature (623)..(623): n is a, c, g, or t
  misc_feature (625)..(627): n is a, c, g, or t
  misc_feature (629)..(629): n is a, c, g, or t
  misc_feature (631)..(631): n is a, c, g, or t
  misc_feature (633)..(635): n is a, c, g, or t
  misc_feature (637)..(642): n is a, c, g, or t
  misc_feature (648)..(649): n is a, c, g, or t
  misc_feature (651)..(651): n is a, c, g, or t
  misc_feature (654)..(654): n is a, c, g, or t
  misc_feature (657)..(657): n is a, c, g, or t
  misc_feature (660)..(660): n is a, c, g, or t
  misc_feature (662)..(664): n is a, c, g, or t
  misc_feature (666)..(666): n is a, c, g, or t
  misc_feature (669)..(671): n is a, c, g, or t
  misc_feature (673)..(673): n is a, c, g, or t
  misc_feature (678)..(678): n is a, c, g, or t
  misc_feature (680)..(680): n is a, c, g, or t
  misc_feature (685)..(685): n is a, c, g, or t
  misc_feature (687)..(687): n is a, c, g, or t
  misc_feature (690)..(691): n is a, c, g, or t
  misc_feature (693)..(693): n is a, c, g, or t
  misc_feature (696)..(698): n is a, c, g, or t
  misc_feature (701)..(704): n is a, c, g, or t
  misc_feature (708)..(708): n is a, c, g, or t
  misc_feature (710)..(712): n is a, c, g, or t
  misc_feature (715)..(718): n is a, c, g, or t
  misc_feature (720)..(721): n is a, c, g, or t
  misc_feature (723)..(723): n is a, c, g, or t
  misc_feature (726)..(727): n is a, c, g, or t
  misc_feature (729)..(730): n is a, c, g, or t
  misc_feature (733)..(737): n is a, c, g, or t
  misc_feature (739)..(750): n is a, c, g, or t
  misc_feature (753)..(753): n is a, c, g, or t
  misc_feature (755)..(756): n is a, c, g, or t
  misc_feature (758)..(760): n is a, c, g, or t
  misc_feature (764)..(769): n is a, c, g, or t
  misc_feature (776)..(782): n is a, c, g, or t
  misc_feature (785)..(785): n is a, c, g, or t
  misc_feature (789)..(789): n is a, c, g, or t
  misc_feature (794)..(795): n is a, c, g, or t
  misc_feature (799)..(801): n is a, c, g, or t
  misc_feature (803)..(803): n is a, c, g, or t
  misc_feature (805)..(805): n is a, c, g, or t
  misc_feature (809)..(813): n is a, c, g, or t
  misc_feature (815)..(820): n is a, c, g, or t
  misc_feature (827)..(828): n is a, c, g, or t
  misc_feature (831)..(831): n is a, c, g, or t
  misc_feature (834)..(834): n is a, c, g, or t
  misc_feature (836)..(836): n is a, c, g, or t
  misc_feature (838)..(839): n is a, c, g, or t
  misc_feature (841)..(843): n is a, c, g, or t
  misc_feature (845)..(851): n is a, c, g, or t
  misc_feature (853)..(857): n is a, c, g, or t
  misc_feature (859)..(860): n is a, c, g, or t
  misc_feature (862)..(863): n is a, c, g, or t
  misc_feature (865)..(867): n is a, c, g, or t
  misc_feature (870)..(871): n is a, c, g, or t
  misc_feature (874)..(874): n is a, c, g, or t
  misc_feature (877)..(877): n is a, c, g, or t
  misc_feature (879)..(880): n is a, c, g, or t
  misc_feature (882)..(882): n is a, c, g, or t
  misc_feature (884)..(885): n is a, c, g, or t
  misc_feature (887)..(887): n is a, c, g, or t
  misc_feature (889)..(890): n is a, c, g, or t
  misc_feature (892)..(892): n is a, c, g, or t
  misc_feature (896)..(897): n is a, c, g, or t
  misc_feature (899)..(900): n is a, c, g, or t
  misc_feature (906)..(906): n is a, c, g, or t
  misc_feature (908)..(908): n is a, c, g, or t
  misc_feature (910)..(911): n is a, c, g, or t
  misc_feature (914)..(914): n is a, c, g, or t
  misc_feature (917)..(922): n is a, c, g, or t
  misc_feature (942)..(942): n is a, c, g, or t
  misc_feature (945)..(945): n is a, c, g, or t
  misc_feature (960)..(960): n is a, c, g, or t
  misc_feature (972)..(972): n is a, c, g, or t
  misc_feature (989)..(989): n is a, c, g, or t
  misc_feature (1035)..(1035): n is a, c, g, or t
  misc_feature (1049)..(1049): n is a, c, g, or t
  misc_feature (1056)..(1056): n is a, c, g, or t
  misc_feature (1080)..(1080): n is a, c, g, or t
  misc_feature (1082)..(1082): n is a, c, g, or t
  misc_feature (1128)..(1128): n is a, c, g, or t
  misc_feature (1131)..(1131): n is a, c, g, or t
  misc_feature (1137)..(1137): n is a, c, g, or t
  misc_feature (1254)..(1254): n is a, c, g, or t
  misc_feature (1333)..(1336): n is a, c, g, or t
  misc_feature (1338)..(1338): n is a, c, g, or t
  misc_feature (1340)..(1341): n is a, c, g, or t
  misc_feature (1343)..(1350): n is a, c, g, or t
  misc_feature (1352)..(1354): n is a, c, g, or t
  misc_feature (1356)..(1358): n is a, c, g, or t
  misc_feature (1360)..(1363): n is a, c, g, or t
  misc_feature (1365)..(1368): n is a, c, g, or t
  misc_feature (1370)..(1370): n is a, c, g, or t
  misc_feature (1372)..(1373): n is a, c, g, or t
  misc_feature (1375)..(1384): n is a, c, g, or t
  misc_feature (1420)..(1421): n is a, c, g, or t
  misc_feature (1424)..(1424): n is a, c, g, or t
  misc_feature (1427)..(1427): n is a, c, g, or t
  misc_feature (1451)..(1451): n is a, c, g, or t
nntnngnnantttngannnntngncnnncnnnnnnnnnnnnnannnnnnnnnnnnnnntnncnnnngnnnnnnnnncnnnnnggnnnnnnnnnnncnnnnnannnnnntnccgnnnnngnnntnncggtnncantngncnnnnnnnnnccnnncgcccncnnnnnnnannnnnnnnnnnngnnnncnnnnnnnannnnnnannnnannngnncnnnncnanncnnnntnnnnntcnnntnnnnnnnngnnnnnnnnanntnnagcnnnnanngnnnntnggnnngnnnngnnnnnagcgnncgnagnnnnaaatccgngtnnnnntngntntgcnaaanctgnnnnngnnnntnnnncnncgtcngcagntttngaatcgnncnannngngnnnnncnntgtggnnnccnnnatnngntnnnnntnggnnancnaagcgnnnttnngnngntacntntnnnaggganngatnccnnnnggnnacngcntnncgncnnggaagnananccngnnnnnnnngngcnnngtngnncnngnnnncnnnnngtnnatcngnnnnaccnnnngcnccngnnngnnnatnngngnatannnnggnnnccnnnncncngacnngnnncnanannncntntnnngnnnnnncgggannanagnggnagnannnanacnnncnttcgncnccganantcnnancgnnncgnnnngcangnnnacnnnngnncntgnngnnagnnnnncnnnnnnnnnnnngtngnncnnncccnnnnnnagaaacnnnnnnnccnggtncatcnngagnnngntnttcnnnnncnnnnnncccgcanngantgngncnngnnncnnnnnnngnnnnncnncnncnnnctnnccnacngnngnanngncnncnacgnnannctgatncngnnccnggnnnnnnggtttcatgcggcagcctcnagnggatagcgcttcacnccaaagaatganaaggccggagggttcanaggcgcggccgtgggattgtagaggtacgccgtccagatgcccgangcggggcagacganttcctcnattggaacgtcgagcgagccgcananacccgccccggagcccgtgacgtagagggacgccggcacgtaggtntgngacaantaattcccgaacgggtctttgatccacacgtacaggttcgagggagccgtaccgagcatcaccttgacaccccggcacacaaactccgcatcgttctgcatctgcaagatgatatcngcgatgagttgcccggccgcgatcgccgccccgagcgccgccacgttcgaggaattgaacgaatagtgaaaggtttctnnnngntnnannnnnnnngnnngnnnannnnannnngncnngnnnnnnnnnntcatgccgcaaccctccaccgcttgaagccttccanntangcntgaaagtagatattccccgtgccngagaagtcgcaaagctgaagatcggcgtagactgaatcggccgcgttgattctccaatccaggggcatcggggcaccgttgatgtacgtcgccacgtcaaagtaatcgtcatcgagcgagtagcccgagcccgtccgaaacttcgccagcaccgtgccagagttcaccgtcccatccgccgtaattgcaatgagccgtttcctacatcgaaactccgaggccatgtcgattggaattgtcgccgtcgcattcaaaggcccagccaggggaatagccgtaggccccggaatcccatttgccgggttcaccgagctatagacaaattcctcatcccggtagcccttcggtgtgcgaggccccacgccctgttgccaggccggcgccatgatgttttgagacggcccgccaaaaatgcggggaatctgtgccgcgatgtcggaagcggggcaaatggaagactggcccgatttcatccaatacttgtaagccccttcaaacaggatcgagagaggctgggccacggtgacgttcgtaacctgaagcgtgacttggattttagagcccggtggacactccagttctttcgtgaacaggtaacgataggagccatagcccgcgatctgcaaacagtcttgcaggttcgatatcagaaactttccattcggcaattgaatctgaacggaaaccgccgtagccgcggccgtgagcatcgagatcgcacgcaggcaccaggtcgcgtctccggtaatctctttcgtgaggctctgagtcgccgtcgccggagcgatgccgaagtattgctgaacaaggaagccctttgggatgtaaaccaccgcaaggcccgtaggcgcaaccggccggccgcacttgctcagaacgaaatcggcttgtgtcaggagttgaatgtccatcacgctacccgatatctacgattttcttgtgccgcagcatttccgccaggagcgccgctacgccgtcttgctgcaaactgacttcgcggcaggattcgcaccgttgcaccaccgtttcgaggctgtgagctacgaccttgttgatttccccttgctgcgcgatgtgtttttccaccgttactacgagttcgtgcaggctggaaactgcctcgtcgattttctgtgtcatgcgctcctcctgcttgttgagcgcgtccacattggaacgaaggtttgcaatgaccacgacgatagcgactatcgaagtgagcagggacacagaactgccgatgatgaccagaatgttcatgagcgcccctggaaaatgccgtcatgggtgtcgttttcattttcgattcgctaccgcataaaccataacaccaagcccggaggcaatcaagagcgccgccaagggattcgcccgcaattgctccaggaaagtaccagccgaaggcccgcacgccgtaccgggctgaagcgccggagccccgccccacggaacgccaggcgagcgatacgaggtttccgcaagcgattgctttctccgtctgcgccggtccatgagagcttgcgggcttgcctgaaccgccatttccggcgagacgttcatcggaaggatgatcggcgcatccgagaattgcgacgggtctgccgcattcgccccggattgcccttgcgccacggtagccggccccattgccgaggatcgagccttgacggccgcgggcgacagcgcttgagacatctggattgccaccgccagaggcaccgtggaatcgaggctaccggattgcccttgcgataccgtggaccgtgccatcagcaccgcttgagccgccacatcggcaggcgtcagggcttgagtcatctgcaaagccgacgcatacggcaccgtcgaatccatgccaggtgacgcacaccccgcgccctttttcatgagcccgagcgcgatcacttgacgcgcccggcgagcagcagggttgccagagccgcgccgtgtcgcttgcggaatcggagagccgggaggcatcagcatatcgtcacctttgaatgaaccaaaccacgcccgccagaaacgccgctccgagaatcagaagaaggtacggcgcgacgataattcccaacattcggaaaagatgccgccgcgccattcctcaattgtagaacgaagggcaacccagcggaagaattgcccctgttcgactccgcgcgccgtcagggacgcggagaaagcgaactactgaactgcgcgatcggtcaagcccttgatgttggcgaccagccagaggcccacgcccccggttgcgcccgatgccagggtggttgccgagacgccggccggcccggaaccggacgggaagtagatggtcaaggaccactgcatctgaggcgccaagtattttgcaaagttgttcatgcggttcaccgcatgaggattcgcaatccccagggtccagacgccggtttcggtttgggtggacatgccagtgaagccctgccccgagggctgaagctccaggtatccttcgacaaagatcttgtcgatgattttgaactcgaaatacgagtactggcagaacgtgagcatatccgccactg

SEQ ID NO: 1664 - DNA, 4000 bp, Escherichia coli
  misc_feature (72)..(72): n is a, c, g, or t
  misc_feature (104)..(104): n is a, c, g, or t
  misc_feature (108)..(108): n is a, c, g, or t
  misc_feature (496)..(496): n is a, c, g, or t
  misc_feature (782)..(782): n is a, c, g, or t
  misc_feature (1007)..(1007): n is a, c, g, or t
  misc_feature (1016)..(1016): n is a, c, g, or t
  misc_feature (1448)..(1448): n is a, c, g, or t
  misc_feature (1544)..(1544): n is a, c, g, or t
  misc_feature (1580)..(1580): n is a, c, g, or t
  misc_feature (1601)..(1601): n is a, c, g, or t
  misc_feature (1612)..(1612): n is a, c, g, or t
  misc_feature (1689)..(1689): n is a, c, g, or t
  misc_feature (1989)..(1989): n is a, c, g, or t
  misc_feature (2000)..(2000): n is a, c, g, or t
cgcctcgcggcgcggctcaatttgccgttcttcgattcggactgcgagatcgaggcggcggccggcgaaacngtcgaagaaatctttcgcaatcgcggcgaggnggtntttcgcgatggcgagcgccgtgtcatcacccgtctgctcgcgcaacctgctcatgttttggcgaccggcggcggcgccttcatggatcccgcgacccgcgccgaaattgcgcgccgcggcgtctccgtgtggctgcgcgccgatatcgacacgttgttgacgcgggtcgcgcgccgcagcaaccggcccctcctgaaacaggggaacccgcgcgccgtgctgacggaactcatcgagcgccgctacccgatctatgcggaggccgatattacggtcgacagtggtgacggcgcggcggatttgaccgcgagccgaaccatcgccgcgcttgccgcctgtccccgcgcgctgctgccgcccgaaccggatggcgagccatgaccgtttnggggaactccgagcgcctgcgcgtcgagctcggcgatcgcagctacgatatcgttattggccccggtctcatcgttcgcgccggggcggagatcctgccgctgatgcgccgccgtcaggccatcatcatcacggaccggatcgtcgcggcgcatcacctcagcccgctatgcgccagctttgatgagcatggcatcgcgcatcgggagatcgtcctgccggccggcgaaggaaccaaggacctcgcccatttcggcgggctggtcgacgatattctcgcctgcggnatcgagcgcggcacgatgctcgtcgcgcttggcggcggcgtggtcggcgacatcgccggtttcgccgcggcgacattgttgcgcggcatcgattttgtacagatcccgacgacgctgttggcacaggtcgatagctcggtcggcggcaagacggcgatcaacaccgctgccggcaagaacctgctcggcgccttctatcagccgcgccaggtgcttgccgacacngacacgctnacgacgctgccggcgcgagaattgcgcgccggctatgccgagatcgcgaaatacggactgatccgcgacgcggggttcttcgagtggctcgaagcgcagcgtaaggcagtctgcgacctcgagccgcacgcggtcacgcgcgcgatcctgacgagctgtcaaatgaaggcgacgatcgtcgccgccgacgaacgtgaggagggtgaccgcgctctgctcaatttcggccataccttcggccatgcgctggaagccgagaccgggttcagcgacgccttgctgcacggagaggcggttgggcttggcatggtcctggctttcgattttgctgtccgcctcgggatcgcgaccggacaggacgcctcccgcgtccgacgtcaccttgcggcggccgggcttccgaccaagctcgccgcgataggcctgtcgggnggcgccgcggccaaccgcctggtcgcgcatatgggcaaggacaaaaaggtgcgagacggccggatcaccttgatcctgccgcgccggatcggcgangcctttgtcatgcgcgatgcatcggctgacgctttncgcgaatttctggctagcgcnggttaggccangtttcgggggcgctcaattgagcgtcggttggagactggcggcggcgcggtccggacggatagccgccgcgcgatanaaatcgacgatatagacgcgaatcgccgcggtcaggcttgatgatacgcgttgccgatcgatctcggtgacgagctggttgacgttggtctgccgttgccgcgcgatctccagcaaggcctcccacatgaccggttcaagccgcacgctggtgcgatggccgcccacgacgatattgcgaatgaccagagatgatcgggcgggctcgcgcttccgaggcgcccggcgcggcaatgctcgtgccatgcggctactttaacggccgcttgggagattgcaacctctacgggtttaatgtagnttccgtacccncatacggtggtatgccttggttcaggatcgatcttcctcgggtattagggtggttaacgagagagcatggacgcgggaggccagctcctctttcagggcctcgtagacgaggcgctgacgggcgacgcggccgagcccgccaaatgtcgccgaggtgatcgtcaccgcgaaatgggtttccccctcggggcgggcgccggcatggccggcatgccgatgcgactcgtcgacgatgtccagtcgcgttggcgcaaaccgctccgtcagcttatcgcgaatcgtctcggcaacactcatcgcgtctctttgcgatcgccgctctgcaactctacggcggcggcaagaaagccggcgagatcgtcgacgatatagtggatgaacgcgctgtctgcgtcgctcttcgcccaatcgagatcgttgcgcatccaggccgtcgtcatgccgagttcggcggccggggcgagattgcgggcgatgtcctcgaccatcagcgcggtctcgggccgcaccgtgtggcgctgcaagagaagccggtagccggcgagcgctggcttcggttcgaaatcggccgcgacaatatcgatgatgccactgaacgcggggctgaggccgagatggtcgagcagccgttcggcgtgcctcaccgaaccgttggtgtggacaatcttgcggccgtgcagccggccgagcgccgcgacgagttcggggttggccggcacacaggccagatcgatctcatgcacaaaggcgagaaattcgtgcgggtcgatgttgtgcacacgcatcaagccattgagggtcgtcccatgctcgcggaaatagctgcgccgcaactccgccgcctcttcgggcgtcacctcgagccgatcgcaaatgtattcgttcatccggcgctgcacctggtcgaacaggcggcacgaggccggatacagcgtgttgtcgagatcaaaaatccaggtctcgatctcgccaagcgggcagcgctcttgtctggttgtatatgccatcgatgcgtccgaagggcctagccgcggcggatcagcgtgccggcgccttccgtgaacaattcgagcaggattgcatgcggcacgcgtccgtccaggatgacggcggcttcgacgccgccatcgaccgcgccgagacaggtctcgactttggggatcatgccgccggagactgtgccttccacgatgagccgccgggcttctgccgcggtcagctccgggatcaggcgcttttcgtcgtcgagcacgccggcgacatcggtcagcagcagaaaccgcttcgccttgaccgcggcggcgactgctccggcgaccgtatcggcattgatattgtacgtctcgccgcccgcaccgaccccgatcggcgcgatgaccgggatgatgtcggattgccgaaacgtcgccagcacgcggtcgtcgatgcgctccggctccccgacaaatcccagatcggctccgttgcgcgtcaatttgcgggcacggatcaggccgccatccttgccgctcaagcctaccgcgcaaccgccgacagcgttgatcgcggcgacgagttgcttgttgatcgtgccggcgagaaccatctcgacgacttccatcgtctcgccgtcggtaacccgcaatccgtccacaaaagtgcttttgatgccgaggcgttgcagcatctggccgatctgcggcccaccgccatgcacgacgatcggattgatcccgacctgcttcaagagaacgatgtcgcgggcgaacggatcgccatcctcaccattccccatcgcatgcccgccgtatttgacgaggatcgtctggccggcataacggcgcagatagggcagcgcctcggcgaggacagcggctttcaatgcggggttggcgatagtcgggttcaccatggcgggcgcattttatcgtgcccggccgctcgtcgccaccgcgcccgccgcaacatcgctgcgagactcggagggtagtgcaaaggcggcgagcgccgcgcgaagggcc

SEQ ID NO: 1665 - DNA, 4000 bp, Escherichia coli
  misc_feature (2)..(4): n is a, c, g, or t
  misc_feature (7)..(7): n is a, c, g, or t
  misc_feature (12)..(12): n is a, c, g, or t
  misc_feature (15)..(16): n is a, c, g, or t
  misc_feature (18)..(18): n is a, c, g, or t
  misc_feature (20)..(20): n is a, c, g, or t
  misc_feature (22)..(23): n is a, c, g, or t
  misc_feature (25)..(25): n is a, c, g, or t
  misc_feature (27)..(27): n is a, c, g, or t
  misc_feature (30)..(37): n is a, c, g, or t
  misc_feature (40)..(40): n is a, c, g, or t
  misc_feature (42)..(49): n is a, c, g, or t
  misc_feature (53)..(53): n is a, c, g, or t
  misc_feature (55)..(55): n is a, c, g, or t
  misc_feature (58)..(61): n is a, c, g, or t
  misc_feature (63)..(66): n is a, c, g, or t
  misc_feature (68)..(69): n is a, c, g, or t
  misc_feature (72)..(73): n is a, c, g, or t
  misc_feature (75)..(77): n is a, c, g, or t
  misc_feature (79)..(79): n is a, c, g, or t
  misc_feature (81)..(83): n is a, c, g, or t
  misc_feature (86)..(89): n is a, c, g, or t
  misc_feature (93)..(93): n is a, c, g, or t
  misc_feature (96)..(96): n is a, c, g, or t
  misc_feature (99)..(99): n is a, c, g, or t
  misc_feature (102)..(102): n is a, c, g, or t
  misc_feature (104)..(109): n is a, c, g, or t
  misc_feature (114)..(115): n is a, c, g, or t
  misc_feature (117)..(120): n is a, c, g, or t
  misc_feature (124)..(124): n is a, c, g, or t
  misc_feature (126)..(129): n is a, c, g, or t
  misc_feature (132)..(132): n is a, c, g, or t
  misc_feature (134)..(135): n is a, c, g, or t
  misc_feature (138)..(140): n is a, c, g, or t
  misc_feature (1990)..(1990): n is a, c, g, or t
  misc_feature (2337)..(2337): n is a, c, g, or t
  misc_feature (2841)..(2841): n is a, c, g, or t
  misc_feature (2947)..(2947): n is a, c, g, or t
  misc_feature (3062)..(3062): n is a, c, g, or t
  misc_feature (3279)..(3279): n is a, c, g, or t
  misc_feature (3430)..(3430): n is a, c, g, or t
gnnngcncgccngcnncngnanncncnccnnnnnnnnganannnnnnnngcgncngannnngnnnncnngcnncnnntngnnntcnnnntcgntgnggntgncnnnnnncgtgnncnnnncctncnnnncgntnncgnnnccggtgccggtgccggtctcgtgcaggtgcgccgtcataccagatccaccgtctgcaggtactcgggcacggcaaccgaccagcccagttcatggtcgatccgcgcgcgcagcgcatcggccgcctccggctcgccgtgggtcacgaaggttcggcgcggtgtttgcgtgaagccgcgcatccacgcgaggatctcgtcggcatcggcgtgggcggaaaggttgtcgagcgaggccacctcggcgcggatcggcacgtcctggccatggatgcggacggtggacgcgccgtgcacgatcgcggcgccacgggtgccgcccgcctggtagccggcgaacaggatggtgttgcgatggtcgggcgcgaatgacttgaggtggtgcaccacgcgtcctcccgtggccatgccactggcggagatgatgaccatcggtccacgaccggcgctgagcgccttggactcctcgaccttgttgacgatcttcgcggcatggcacatgccctcgcattcctcgggcgagagccggtgctcgtcgcgatgggcgtggtacagccgtgtggcatcgatggccatcgggctgtccaggtacacgggcaggtgctggtggatgcgcccttgcttcttgagctggtagatgccgtacatcaggctctgcgctcggccgacagcgaacgctgggatgaccacgacccctccacgggcggccgtcttgttgatgacagtctccagctgcgccagtgcgtcggacgcttcatgcttgcggttgccgtaggtggattccaccagcaggtagtcggcgccggggacctgcaccggcgggcgcagcaccgggtcgttgggccggccgatgtcgccggagaagagcacggatcgccggccgtcgttgaggtgcacgaaggccgagccgagcatgtgcccggaaggcgtcaaccgcgcggtgagtccgggcagcgcctcgaagtcctgagagaacggacgtggcgcgaacagcttcaggcagcgctcggcgtcctcacgggtgtacagcggcagcgcgggctggtgtttggagaaaccgtgccggttggcgaacttcgcctcttcctcctgcagatggccgctgtcggtgagcaggatcttgcacagctcgtgcgtcgcggacgtgcagtaaacccggccgcgaaagccttgtcgcgccagcagtggcaggtagccgctgtggtcgatgtgggcgtgggtgagcacgaccgcgtcgacggtcttgggcgcgaccggcagcggctcccagttgcgcaggcgcagctgcttgaatccctggaacaggccgcagtccaccagaatggtcgcgtcgccatggcgcagcaggtatttggaaccggtcacggtgccggtggcacccagaaattgaagttgcatggtaggtctccaaggatgttgtcgttcaaagaaggaccggccgatccggcaactcgttgccgtggtccgcgccccgcggaaagtgctgcaccagcaggtggctgacggccacgatgccttccagggctccggcctcgaagcgtccctgcgcaaactgggcttccatgcgctggcacacagccgaccacctttcggcaccgcaacaggcatggatgccgcgatcggccacgatctccacggcccggtcggccagcagcacgtagatcaggacgccgctgttgtgcgccgtatcccacacacccaggcgtgcgaacaggtccagcgcccgctcgcccggcgattggttgcgccacagtggcgatccgtccagcgcaccctcgaccacgaagcgcagctggcccccatgctggaactctcccgtgcggatggcctgctcgatcgcatccagcgcgcncggggggaaggcgcggcggactgcgcgatccgtggtcgcaaggtggcgaagaagtcgttgcatgttcatctcaccaccgtcctgacgcgccgccgccaccgaagccgccgccgccgccgcggaatccaccgccaccaccgcccaatcctccgcccggccagccgcctccccggtggcgcccgtgcatgccgccgtggccacccatgccgatgcccagcagcgtgacgaggaatcccgccagtccagccaccgcggccaccgcgaaggtgcccaccaacagccacgcagcggcacccagcacgccagccgtgaccagggagcctggaaggcggccgagggcgttgcgnagcactccgcccagcatcagggccgcgacgaacaggaagggccaggcctgcccgatgtcgttggtctgcccctgccgccgtgggtccgccgcaggcagggcctcgccatcgatcacccgcatgatctgttcggcgcctgcggcgatgccgccgtcgaaatcgccctggcgcaggcgcggcgtgatcacctcgtcgatgatgcgccgcgataccacgtcgctcagcgcaccctcgatgccgtatccgacttcgatgcgcacggtgcggtcgtccttggccaccaggagcaacgcgccgtcgtccaccttgcgacggccgagcttccattgctctaccacccgcagggcgtactgctcgacgggttcgggccgcgtcgagcggaccatcagcacggcgatctgcacgcccttgcgttgctcgaaggcccgaagctgcgcatccagcgcggcgacacgatcggcggcgagcgttcccgtgagatcggtgacgcgcgcctgcagcggnggaacggcgaccaactcctgcgcggacgcgaccgaaaggaacaggctcagcagcagccaggccagagcgtgggccagccgaagaggggccgccggagagagcaccnctgttctgggcgttctcatgtcaggggcgcgccgccggcgccgaggcgccgaaatcgacctgtggcggcgccgccatggccttctcgtcggcgaccgagaaattgggcttgacgncgtagctgaacagcttggccgtgatgttggtcgggaagctgcgcgtgagcacgttgtaatcctgcaccgccttcacgtagcgcccacgcgccacggtgatgcggttctccgtgccctcaagttgggcacgcaggtcttgaaaagcctggttcgccttgagttgcgggtagttctcgctcaccaccagcagccggctcagcgcgccggacagttcgcnctgtgccgcctggaacttctggaacgcctcggggttgttgacgagttccggcgtggcctggatcgaggtcgccttcgcgcgggcctcgaccacccgggtcagcgtctcctgctcgaagttggtctcgcccttgacggtcgcgacgatgttngggatcaggtcggcgcgccgctggtactggttcagcacctcggaccaggcggacttggtctgctcgtccagccgctggaagtcgttgtagccgcatccgctcagcgacagggcaagcgctgcgagcagggacatcaggatcagtctcatggttcggtttccgtggaagtgagaaaagtgcgggacggtgaagcgctcaccaggacggggttggctggccaccaatgccgcggaatgagcagcagcgcgagggtggcggccagtggaatcgacagccacgcaaaggtgctctgcatcacagcgccgaatagccatccggtggcggccgatcccagtgtttgtccgaggccggctgccgcggcgagccctcccatcgcgataccgagccgccgcgccgaggtgccggcagcgaggtaggccagggtggggagcacgagacccgtgcccgcagccgtgaaactcacgccgacgtacagccacatctcgctgccatggcgggccagcatcaggagcccggcgatgcccaggaccatgccgcaggccagtacgcggcgtgggtcggcgcgctcca

SEQ ID NO: 1666 - DNA, 4000 bp, Escherichia coli
  misc_feature (3191)..(3194): n is a, c, g, or t
  misc_feature (3283)..(3286): n is a, c, g, or t
  misc_feature (3301)..(3302): n is a, c, g, or t
  misc_feature (3310)..(3310): n is a, c, g, or t
  misc_feature (3313)..(3313): n is a, c, g, or t
  misc_feature (3347)..(3347): n is a, c, g, or t
  misc_feature (3357)..(3357): n is a, c, g, or t
  misc_feature (3361)..(3361): n is a, c, g, or t
  misc_feature (3366)..(3366): n is a, c, g, or t
  misc_feature (3431)..(3431): n is a, c, g, or t
  misc_feature (3575)..(3576): n is a, c, g, or t
  misc_feature (3667)..(3668): n is a, c, g, or t
  misc_feature (3670)..(3670): n is a, c, g, or t
  misc_feature (3674)..(3674): n is a, c, g, or t
  misc_feature (3684)..(3684): n is a, c, g, or t
  misc_feature (3687)..(3688): n is a, c, g, or t
  misc_feature (3690)..(3690): n is a, c, g, or t
  misc_feature (3692)..(3693): n is a, c, g, or t
  misc_feature (3695)..(3695): n is a, c, g, or t
  misc_feature (3697)..(3697): n is a, c, g, or t
  misc_feature (3700)..(3700): n is a, c, g, or t
  misc_feature (3703)..(3703): n is a, c, g, or t
  misc_feature (3707)..(3707): n is a, c, g, or t
  misc_feature (3716)..(3716): n is a, c, g, or t
  misc_feature (3718)..(3721): n is a, c, g, or t
  misc_feature (3723)..(3723): n is a, c, g, or t
  misc_feature (3727)..(3727): n is a, c, g, or t
  misc_feature (3729)..(3729): n is a, c, g, or t
  misc_feature (3731)..(3732): n is a, c, g, or t
  misc_feature (3828)..(3828): n is a, c, g, or t
  misc_feature (3833)..(3833): n is a, c, g, or t
  misc_feature (3838)..(3838): n is a, c, g, or t
  misc_feature (3840)..(3840): n is a, c, g, or t
  misc_feature (3846)..(3846): n is a, c, g, or t
  misc_feature (3848)..(3849): n is a, c, g, or t
  misc_feature (3855)..(3855): n is a, c, g, or t
  misc_feature (3858)..(3859): n is a, c, g, or t
  misc_feature (3862)..(3862): n is a, c, g, or t
  misc_feature (3864)..(3864): n is a, c, g, or t
  misc_feature (3871)..(3874): n is a, c, g, or t
  misc_feature (3876)..(3876): n is a, c, g, or t
  misc_feature (3881)..(3882): n is a, c, g, or t
  misc_feature (3888)..(3888): n is a, c, g, or t
  misc_feature (3890)..(3892): n is a, c, g, or t
  misc_feature (3898)..(3898): n is a, c, g, or t
  misc_feature (3900)..(3900): n is a, c, g, or t
  misc_feature (3904)..(3904): n is a, c, g, or t
  misc_feature (3908)..(3908): n is a, c, g, or t
  misc_feature (3914)..(3914): n is a, c, g, or t
  misc_feature (3918)..(3919): n is a, c, g, or t
  misc_feature (3921)..(3921): n is a, c, g, or t
  misc_feature (3924)..(3924): n is a, c, g, or t
  misc_feature (3928)..(3931): n is a, c, g, or t
  misc_feature (3937)..(3938): n is a, c, g, or t
  misc_feature (3940)..(3940): n is a, c, g, or t
  misc_feature (3943)..(3944): n is a, c, g, or t
  misc_feature (3951)..(3951): n is a, c, g, or t
  misc_feature (3954)..(3955): n is a, c, g, or t
  misc_feature (3957)..(3958): n is a, c, g, or t
  misc_feature (3960)..(3961): n is a, c, g, or t
  misc_feature (3965)..(3968): n is a, c, g, or t
  misc_feature (3972)..(3972): n is a, c, g, or t
  misc_feature (3974)..(3974): n is a, c, g, or t
  misc_feature (3978)..(3979): n is a, c, g, or t
  misc_feature (3982)..(3983): n is a, c, g, or t
  misc_feature (3985)..(3985): n is a, c, g, or t
  misc_feature (3987)..(3987): n is a, c, g, or t
  misc_feature (3989)..(3989): n is a, c, g, or t
gtggtatattaactcttgactttcaccaaggccaatatgctaaggtactattaacagaaaatgttacaggtattaatattcttaatgctcctgaagcgggtacagtaggtaatatgacagtagagctaacccaagatgctacaggcagcagaacttttgcaggtgcatttcttacagatagtggggcaggtgtaggagtttctgcggctgctaactctttaagccttatcgcgttactaactacagatggtggagcaacttatttaggtatgtcagcgggtaaggcgtacgcgcaatgatacctttatacacggtcaacgatgagtcaaaacgaataaccatatcagactctatacgtgcacaagacggcagccccatagtaaatgccttagtgcgtttatttcgtaatggtgtaccggttagtaaaacagtaaaaacagacgcagaaggtaaattctctttagattctttaccttatggtgactaccatgtagaggttttagctaataatattttagcccctgtagccaaaacatacatattagactcagctactttaacaggtactcctttggagggtgtacctacgtgggattcttgtgaaggtttaggcttaggtttaggctactcagaagacttatggcacgcacctcaatttgaatttggggttggcgctatttggcataccaatggagttatatccaatgattactatgaaaataagacctttgtatgtaatacaggtaccgacttctcagatgtactagcccaaagagctaatggaggcggagcattagctatgcctcatacccctattggaggtgaagctttccctgtaacgcctatacccgggtcatctatggatgactttacaatagtaaatccttttgattactatttggacacagatgggcattggtaccattatagatatggtaatagaataccagagtattgctacatgggagactatgcgtcccctcatgcaggtattaaagtccctgagggcttccattttgactcggcagtgggtccttttggaacatggtttattagtgatgtaaacaacctaacatactacagtgactggaatattacagacccaggagcttataacgctattcctttgtatctataccttctatatcatatagattctatggaccctactcccttgttctcctttgtatatggcaacctttcgaacattaaagatgatgttggaagcgcctgtattccactagagttccttttaggctcagagcactctatatcttcactagaattaagttcaggagaaggactaccctcttggatgtatacagggggaacttcagaaggtataccccctttagcttatactgaagagattgaagagaacatttataaatataaagctgtatctcaagactctaccataccgaagagcaagaagaagtatatactaaacgaattagtaattaagcctcgagttacccagctacaaacattcctaggtattacagaaacacaagctaaggctgctgtaatacgtgaaagtaatttaggtactttgacctctacgtatgataccccaacaggggcggatgtgtggaacatcagtgacgatatatcaaattatgcgttgactggtatggatactattccagtagtcccggatacttacttttcttcgggagagttcaacttcataataaataataataacttagcagtagtaggggcccataaagccgccccagaagtaaaagaagccattagtacttttggtacttcagagtgggatactgcaggaaagacttacttacagaacttaatgcgcttttcaaaagtgcctagacaggtggagagaaccagctacacgttgcccgaactagataatatactagacgatatatctcaaacattgaaccctacgcaggagttctcacccgagactttagctttcgtaaacaatgtagactcaaaaactgcagattacttaggagccgatacggttggagggcgctatatagctttagcggcatcaggtgcaggagcttatagtgactcagggaataagtatgaaagcaatccttattatggatttgctaaaggtgctttaatggcccaacttccgggactaggggatgactctagaaacctagttatggacacttcaccagatataactcattatcaacccagttcatactctatcaaagaaactttagtaattggagccttaggagtataccaattcgttactgagggagtaggagaactagtagatgcaataagccatagtgtaggacttccagggttaaatacgttattctcaaccaccttagctcctagaggtttaaatggtactcctgggctttccactagtaagccagtgaaagagcgggagtggtacgagaaggcttatgatgattgggaggaggaaagcctggggtatatgtgggcggtgtctacagggtggaaagccgaaaatacagatcaatttttccagtcgggagtcttagcagctcaatgggctaataagttagaccctagttacactttaccaactaccgcaatgaatcccccaacaccttctgtgggggataaagtgctccctgctatgttgtacaataaagccttcacaaattataaagagtacgaaggggcagaactttctactacttggaacgtagacaaagatagctgggacactgaagtatctttcatagacgagaatggagtagctcaaagtcattctgaggcaggagtgtacggagcgcctttagctctaaatgcagggaacactgagttagtagcaaatttagagcgctcaggttttgaaagaacttcttacgaagtcgatcccgcagatgtaactaaaatgatagctactttcgctaagcgcgctgatgtatatggagctagggaagacctaaaaatcttccaagtatctggcggtttggcagactttgatgctttctacaacagtaatttaactgctgaagagtacacagatgcacaacatgataacctactagcgagggcgagagatttagaatccgctagagagctttggttaacagctgaagagatcaacctgcgcacagaggaggcagactctgtaatacacctgcagacgctatggcatgaatattcagatgctcataaggtagcgaaggagtgtagagaagccgcaatggagcaannnncacgtgagtcgcgcacagaggaggcgttacacgctgccaaggttaaaagcataaaagcagcctacaatagagatcacccctccctgagnnnntcctgctcgggttannactacttnganggctatgggtgcccagaggagcttagtagacatnaggcctcagnagcnctgtnttgggagataatgaaagcctccatagacctttgtgatgatacgctttatagcgagaaacttgctntatgggggttaatagtagcagagatgtctagggtagatcttttacggcaggaaagctgggacacctccatggataaaaaagatgaagtaaatggggcttgggagcttttccaggattggaaagacgcagcaggagcgcatggtnntacttggggtactaaccctgacgggtccaaagggactagaaaaacgtttttcttttaaaggactatgagataaaattatggaagataaaannanaaanaagtaatggnaannanannancnaancanaaantaagcattncnnnnantacnancnntacatacgcaaaaccaaaacttagcagacaaacagctaataagtttaaaggggctatgggtacagttagtgatggagttaaccaagatacaggggngtggntagangntaaatntnnaaatcntgnngcntnaggaaannnngnattanntattantnnnaaaaanangaanaaantagaanaagnngnaanaggnnnntctagnncnatnnacgatanacnnanngnnactnnnnacantngcannggnnanangnaagaaatagta

SEQ ID NO: 1667 - DNA, 4000 bp, Escherichia coli
  misc_feature (2029)..(2029): n is a, c, g, or t
ggtaatcgacggtgtaagtttggtaatattcatttctcggatcattgactatacaaacataatcttcccaatccatgtctacatattctttagcaaattcctgcggcgtcatgctcccttttctgtgaaaatctccgtctttatcttcccattgccaatcgaattcttcaggaggtgtgcctagatggatgcataatattctccaaatatcttcaactctcttatctttgtgcactctagcttcctctttcgacccaccattatctaaaatttcacgtagttcacttgctccacttcttagaatgtctttcagtatagcattcatccatcttgtactcgatgatgagatactctctggataagcagtttttggcactaatccatgtttacggattaggttcattgccatattccattgcccgccatctccaattggatcacccagaagaaatccaatagttcggtcgtctagaggtctatctgctgtgtcaataattgcttcgaaaaaatgattacttctttcaaatttatcccagaaatgaatatgtgattgactaaattcaaagttcttgacatttaatttcttcattgtaccaggtctaaataaattcaaagttgcaaaaagccagcatcttccactacttttttgatttgtgactttccaatcatccaattttacagaaaatgacgaatcaatattttgtactaagtctctatttagcgcaacatctagtaggtttccatttgttactgcattctgtgcaactttcgctgctggatcatttgcaaaattatttctgaattcttttagttgtttatttgttactgattctcccatcggctcaccttcggtgaggctagtcgtacaatgacgactctaagtcattgcttctctatatctctgcagattcagcaaaacctgctgcaattagagtatccgccataagtgaagaaaagttagcaacctcacccgcagtaagctgaattgccgttccgtcttcgtcaataatagggtccattaaatcttgaataattctgattcttttcatatctgaattatttcttatatcttgttcttggtttattgaagttgatgagattgccccggtagctctttctggaaattcatccatttgacgaattctgtcttcctcatcaaattcgggatcatcccatatttcttgagatggttccggcgtaggtattacagaagagataatttcttcttctttatctaaatcactaaattccgttagtgcagcattacctcctaaacttggtttactcgctgacattggttttcctccatgtagcatattatcccaagaaacatcatttttgtatttctcaactaatctttcaacatttgtataataggctctttctgaagggtcatgacgttgccaatttaatggtgggactttatttccattctgatttccactcgacattttgagtaaatttgttaaaattgcatgttgagtgaacgcattcatcctcattcttgtcagatccgaaacagacgttcttgctactccaagtctgcgtgattgcaattgtgtttttgcattcattccttcattccttatagtttcagccaactcattttctaaatgacttagtaattgataaatcgaagaccagaaatttggtactgtaatttccacaggtacattttgactcgctttttgttgcctagtcaactcaaaaagggctttttcgacaacaattagttgttgcttagataatcttgatgaagcgacttcgtcaatcatgtgagcaacctgtgtaacggcagagagaggaaggccatgaatgattcctttgtttatcttctttcaagtctgttcatccgttggactcaataagaaaaaacctctcggagggtcgcaggtgtacccgagtggtcaaaggggtcgggctcaagttccgatgcgtagagcttcgcaggttcgaatcctgcctcctgcaccatcttcattttcgcgatctaataaattcttttagaaactcaattgtccctaaagtnccctttacttttgttagatgatcagcagcttcttccacgcctgggaattcattatttactgctacagaaaaaccacacatattgaacatagggatatcattcgacgcatctccaactgcgataactttctttggatcaatacctctttgttcaaatgcaactttaagtccactagctttattcaattctttttcagtaatgtgtactgcaaatcctgtaggtacaactcgtaaatcaggccattgtgaatcttttagagcatctttcattttttcataattttccgtatccaataagcaccattcggtctctctccagcgatttgtctcaattccttttggatctaatccctcaatttgagtagctagccattccgccgcatctcttgccctctttccatcagctaggcatcttatcggaaatcctgctttactatcccaaaccattcctccattctcacctattgcaaaccctgatatcgcaagcacttgttgtattggcgtaacatttggtagagttcttcctgaggctaaagatactgttatgcccatattctctatttctcttattaaagggattaaatcaggttggaaaccgtcaaaatctagtaatgtgccatctatatcaaagacaatcatttcccaatcatcgccttgaggcatcgtactcatatgcttgcgtagcagtcctatttcatcatctcatcgctcagacatcatctagtcatcttcaaggatggggctcttgtcgggtaactatggatgaggaagaatttcttcttcttgatgatgacgaggaagaaatcgccatttcttctaatgacaaatcaattaccgataaagtagcaaaacatacacctggggaaatattatctaatatatctaaaacagtcggggacagtatttcacagattcctttgaaactgaaagaatcatcaaatctgaagaagtcgatgaaagaaaaaaatgacaatataatctcatttgcacaaagtgcagataaaataatcgatgcagatttagttgttgatggaacttacaacatagaatggagaataggcggtatggattgcgcagattgtgcaatgaaggctagaaaagcagtcaatagattacccggcgtcaacaatgtgaaggtatcagttacagaaggtatcgttagaatggatttagatttagcaaaaggtagagtatctagagcaaactctgtattagagagtcttggacacaatcctgagattctctggcaatctgtgttcggccttacgcctagtcgtgcagctactaatcttggaatagaacgtaaaatgcttagaacagcattattagaagtcccaggaatgattaatgtaagatttgaagatggtaaaattgaattccaaagaattaccttcacttcaataaaaatgaaagatatctcaaatgaaaggctacaacaacttcttggtagtgatttaaaacttgaagaatctactaccttaaaacttagacctgaccaagtccaacttttatcagcagttctcacattgcctttacttgtaggtgtggtcgctattgatggattaaattcaatacctgattctttagctatactgttatgtttagtcggagtttcatttgcaggttttccaatgtttaaggctgccatagcaagtattcaaaatcgagtactcggttttcaggtattgacttcattggcagtaattggggcgatgttgatgcaagaatacccagaagcactcatagttacaggattggttgcctttgcagcacatctagaagaaagcgcccttgtaaaagccagaaatgctatgcaaggaggacttgatcgcttaccgaggttagctcgactttcatcttccactgaaactagttgctgtgatgatggaacttgtggacctactgttaagccagttgaagtcagttgttgcgatgatgatacatgcgattctaattttaaagtaattaaatc

SEQ ID NO: 1668 - DNA, 4000 bp, Escherichia coli
  misc_feature (1)..(3): n is a, c, g, or t
  misc_feature (5)..(8): n is a, c, g, or t
  misc_feature (11)..(11): n is a, c, g, or t
  misc_feature (13)..(14): n is a, c, g, or t
  misc_feature (16)..(17): n is a, c, g, or t
  misc_feature (20)..(23): n is a, c, g, or t
  misc_feature (25)..(26): n is a, c, g, or t
  misc_feature (32)..(33): n is a, c, g, or t
  misc_feature (35)..(35): n is a, c, g, or t
  misc_feature (37)..(37): n is a, c, g, or t
  misc_feature (39)..(39): n is a, c, g, or t
  misc_feature (41)..(42): n is a, c, g, or t
  misc_feature (44)..(44): n is a, c, g, or t
  misc_feature (47)..(47): n is a, c, g, or t
  misc_feature (49)..(50): n is a, c, g, or t
  misc_feature (52)..(52): n is a, c, g, or t
  misc_feature (54)..(54): n is a, c, g, or t
  misc_feature (56)..(58): n is a, c, g, or t
  misc_feature (60)..(60): n is a, c, g, or t
  misc_feature (63)..(63): n is a, c, g, or t
  misc_feature (65)..(66): n is a, c, g, or t
  misc_feature (71)..(71): n is a, c, g, or t
  misc_feature (74)..(74): n is a, c, g, or t
  misc_feature (76)..(79): n is a, c, g, or t
  misc_feature (83)..(84): n is a, c, g, or t
  misc_feature (90)..(90): n is a, c, g, or t
  misc_feature (92)..(92): n is a, c, g, or t
  misc_feature (94)..(96): n is a, c, g, or t
  misc_feature (98)..(98): n is a, c, g, or t
  misc_feature (100)..(100): n is a, c, g, or t
  misc_feature (102)..(102): n is a, c, g, or t
  misc_feature (105)..(105): n is a, c, g, or t
  misc_feature (107)..(108): n is a, c, g, or t
  misc_feature (110)..(111): n is a, c, g, or t
  misc_feature (114)..(116): n is a, c, g, or t
  misc_feature (120)..(120): n is a, c, g, or t
  misc_feature (122)..(125): n is a, c, g, or t
  misc_feature (127)..(127): n is a, c, g, or t
  misc_feature (129)..(129): n is a, c, g, or t
  misc_feature (131)..(131): n is a, c, g, or t
  misc_feature (134)..(135): n is a, c, g, or t
  misc_feature (142)..(144): n is a, c, g, or t
  misc_feature (146)..(147): n is a, c, g, or t
  misc_feature (150)..(150): n is a, c, g, or t
  misc_feature (155)..(158): n is a, c, g, or t
  misc_feature (160)..(161): n is a, c, g, or t
  misc_feature (163)..(163): n is a, c, g, or t
  misc_feature (166)..(166): n is a, c, g, or t
  misc_feature (171)..(171): n is a, c, g, or t
  misc_feature (173)..(174): n is a, c, g, or t
  misc_feature (182)..(182): n is a, c, g, or t
  misc_feature (184)..(184): n is a, c, g, or t
  misc_feature (187)..(188): n is a, c, g, or t
  misc_feature (191)..(191): n is a, c, g, or t
  misc_feature (194)..(194): n is a, c, g, or t
  misc_feature (196)..(196): n is a, c, g, or t
  misc_feature (198)..(198): n is a, c, g, or t
  misc_feature (200)..(204): n is a, c, g, or t
  misc_feature (206)..(206): n is a, c, g, or t
  misc_feature (209)..(212): n is a, c, g, or t
  misc_feature (220)..(221): n is a, c, g, or t
  misc_feature (223)..(224): n is a, c, g, or t
  misc_feature (228)..(228): n is a, c, g, or t
  misc_feature (230)..(232): n is a, c, g, or t
  misc_feature (238)..(239): n is a, c, g, or t
  misc_feature (242)..(242): n is a, c, g, or t
  misc_feature (244)..(244): n is a, c, g, or t
  misc_feature (246)..(246): n is a, c, g, or t
  misc_feature (249)..(251): n is a, c, g, or t
  misc_feature (257)..(260): n is a, c, g, or t
  misc_feature (267)..(267): n is a, c, g, or t
  misc_feature (269)..(269): n is a, c, g, or t
  misc_feature (271)..(273): n is a, c, g, or t
  misc_feature (277)..(279): n is a, c, g, or t
  misc_feature (286)..(288): n is a, c, g, or t
  misc_feature (290)..(292): n is a, c, g, or t
  misc_feature (295)..(296): n is a, c, g, or t
  misc_feature (299)..(300): n is a, c, g, or t
  misc_feature (303)..(304): n is a, c, g, or t
  misc_feature (307)..(307): n is a, c, g, or t
  misc_feature (309)..(309): n is a, c, g, or t
  misc_feature (311)..(311): n is a, c, g, or t
  misc_feature (315)..(318): n is a, c, g, or t
  misc_feature (320)..(320): n is a, c, g, or t
  misc_feature (323)..(324): n is a, c, g, or t
  misc_feature (327)..(327): n is a, c, g, or t
  misc_feature (329)..(332): n is a, c, g, or t
  misc_feature (334)..(334): n is a, c, g, or t
  misc_feature (340)..(341): n is a, c, g, or t
  misc_feature (343)..(344): n is a, c, g, or t
  misc_feature (346)..(347): n is a, c, g, or t
  misc_feature (349)..(349): n is a, c, g, or t
  misc_feature (351)..(352): n is a, c, g, or t
  misc_feature (355)..(355): n is a, c, g, or t
  misc_feature (359)..(359): n is a, c, g, or t
  misc_feature (363)..(363): n is a, c, g, or t
  misc_feature (365)..(365): n is a, c, g, or t
  misc_feature (367)..(368): n is a, c, g, or t
  misc_feature (373)..(374): n is a, c, g, or t
  misc_feature (377)..(377): n is a, c, g, or t
  misc_feature (379)..(379): n is a, c, g, or t
  misc_feature (381)..(381): n is a, c, g, or t
  misc_feature (383)..(383): n is a, c, g, or t
  misc_feature (385)..(385): n is a, c, g, or t
  misc_feature (388)..(388): n is a, c, g, or t
  misc_feature (391)..(391): n is a, c, g, or t
  misc_feature (394)..(394): n is a, c, g, or t
  misc_feature (403)..(405): n is a, c, g, or t
  misc_feature (407)..(408): n is a, c, g, or t
  misc_feature (410)..(410): n is a, c, g, or t
  misc_feature (412)..(412): n is a, c, g, or t
  misc_feature (415)..(416): n is a, c, g, or t
  misc_feature (418)..(418): n is a, c, g, or t
  misc_feature (420)..(421): n is a, c, g, or t
  misc_feature (424)..(425): n is a, c, g, or t
  misc_feature (428)..(428): n is a, c, g, or t
  misc_feature (430)..(431): n is a, c, g, or t
  misc_feature (434)..(435): n is a, c, g, or t
  misc_feature (437)..(437): n is a, c, g, or t
  misc_feature (439)..(440): n is a, c, g, or t
  misc_feature (444)..(449): n is a, c, g, or t
  misc_feature (451)..(456): n is a, c, g, or t
  misc_feature (461)..(462): n is a, c, g, or t
  misc_feature (464)..(464): n is a, c, g, or t
  misc_feature (467)..(467): n is a, c, g, or t
  misc_feature (469)..(470): n is a, c, g, or t
  misc_feature (473)..(474): n is a, c, g, or t
  misc_feature (479)..(479): n is a, c, g, or t
  misc_feature (481)..(482): n is a, c, g, or t
  misc_feature (485)..(485): n is a, c, g, or t
  misc_feature (487)..(488): n is a, c, g, or t
  misc_feature (490)..(493): n is a, c, g, or t
  misc_feature (495)..(495): n is a, c, g, or t
  misc_feature (497)..(498): n is a, c, g, or t
  misc_feature (500)..(500): n is a, c, g, or t
  misc_feature (502)..(503): n is a, c, g, or t
  misc_feature (506)..(507): n is a, c, g, or t
  misc_feature (512)..(512): n is a, c, g, or t
  misc_feature (514)..(515): n is a, c, g, or t
  misc_feature (518)..(520): n is a, c, g, or t
  misc_feature (524)..(527): n is a, c, g, or t
  misc_feature (529)..(529): n is a, c, g, or t
  misc_feature (533)..(534): n is a, c, g, or t
  misc_feature (536)..(536): n is a, c, g, or t
  misc_feature (538)..(541): n is a, c, g, or t
  misc_feature (543)..(545): n is a, c, g, or t
  misc_feature (547)..(548): n is a, c, g, or t
  misc_feature (550)..(550): n is a, c, g, or t
  misc_feature (554)..(556): n is a, c, g, or t
  misc_feature (559)..(559): n is a, c, g, or t
  misc_feature (561)..(561): n is a, c, g, or t
  misc_feature (565)..(566): n is a, c, g, or t
  misc_feature (568)..(568): n is a, c, g, or t
  misc_feature (572)..(572): n is a, c, g, or t
  misc_feature (574)..(575): n is a, c, g, or t
  misc_feature (577)..(577): n is a, c, g, or t
  misc_feature (580)..(581): n is a, c, g, or t
  misc_feature (583)..(584): n is a, c, g, or t
  misc_feature (586)..(586): n is a, c, g, or t
  misc_feature (589)..(592): n is a, c, g, or t
  misc_feature (595)..(596): n is a, c, g, or t
  misc_feature (600)..(603): n is a, c, g, or t
  misc_feature (605)..(606): n is a, c, g, or t
  misc_feature (608)..(613): n is a, c, g, or t
  misc_feature (616)..(618): n is a, c, g, or t
  misc_feature (620)..(621): n is a, c, g, or t
  misc_feature (623)..(624): n is a, c, g, or t
  misc_feature (629)..(629): n is a, c, g, or t
  misc_feature (631)..(632): n is a, c, g, or t
  misc_feature (634)..(634): n is a, c, g, or t
  misc_feature (638)..(643): n is a, c, g, or t
  misc_feature (645)..(645): n is a, c, g, or t
  misc_feature (647)..(648): n is a, c, g, or t
  misc_feature (651)..(651): n is a, c, g, or t
  misc_feature (653)..(653): n is a, c, g, or t
  misc_feature (657)..(657): n is a, c, g, or t
  misc_feature (660)..(660): n is a, c, g, or t
  misc_feature (667)..(668): n is a, c, g, or t
  misc_feature (670)..(670): n is a, c, g, or t
  misc_feature (672)..(672): n is a, c, g, or t
  misc_feature (677)..(677): n is a, c, g, or t
  misc_feature (679)..(683): n is a, c, g, or t
  misc_feature (685)..(686): n is a, c, g, or t
  misc_feature (689)..(692): n is a, c, g, or t
  misc_feature (694)..(697): n is a, c, g, or t
  misc_feature (700)..(700): n is a, c, g, or t
  misc_feature (703)..(704): n is a, c, g, or t
  misc_feature (706)..(706): n is a, c, g, or t
  misc_feature (713)..(713): n is a, c, g, or t
  misc_feature (715)..(715): n is a, c, g, or t
  misc_feature (717)..(719): n is a, c, g, or t
  misc_feature (721)..(721): n is a, c, g, or t
  misc_feature (723)..(724): n is a, c, g, or t
  misc_feature (728)..(730): n is a, c, g, or t
  misc_feature (734)..(734): n is a, c, g, or t
  misc_feature (736)..(740): n is a, c, g, or t
  misc_feature (742)..(742): n is a, c, g, or t
  misc_feature (744)..(747): n is a, c, g, or t
  misc_feature (751)..(752): n is a, c, g, or t
  misc_feature (758)..(759): n is a, c, g, or t
  misc_feature (761)..(761): n is a, c, g, or t
  misc_feature (763)..(764): n is a, c, g, or t
  misc_feature (766)..(769): n is a, c, g, or t
  misc_feature (773)..(773): n is a, c, g, or t
  misc_feature (776)..(777): n is a, c, g, or t
  misc_feature (779)..(779): n is a, c, g, or t
  misc_feature (781)..(785): n is a, c, g, or t
  misc_feature (789)..(789): n is a, c, g, or t
  misc_feature (792)..(792): n is a, c, g, or t
  misc_feature (794)..(796): n is a, c, g, or t
  misc_feature (800)..(800): n is a, c, g, or t
  misc_feature (802)..(802): n is a, c, g, or t
  misc_feature (804)..(804): n is a, c, g, or t
  misc_feature (807)..(808): n is a, c, g, or t
  misc_feature (810)..(810): n is a, c, g, or t
  misc_feature (814)..(815): n is a, c, g, or t
  misc_feature (819)..(821): n is a, c, g, or t
  misc_feature (824)..(825): n is a, c, g, or t
  misc_feature (827)..(827): n is a, c, g, or t
  misc_feature (829)..(829): n is a, c, g, or t
  misc_feature (832)..(837): n is a, c, g, or t
  misc_feature (839)..(839): n is a, c, g, or t
  misc_feature (841)..(844): n is a, c, g, or t
  misc_feature (847)..(847): n is a, c, g, or t
  misc_feature (849)..(851): n is a, c, g, or t
  misc_feature (856)..(860): n is a, c, g, or t
  misc_feature (862)..(864): n is a, c, g, or t
  misc_feature (869)..(871): n is a, c, g, or t
  misc_feature (873)..(873): n is a, c, g, or t
  misc_feature (876)..(876): n is a, c, g, or t
  misc_feature (878)..(880): n is a, c, g, or t
  misc_feature (886)..(886): n is a, c, g, or t
  misc_feature (888)..(891): n is a, c, g, or t
  misc_feature (893)..(894): n is a, c, g, or t
  misc_feature (896)..(897): n is a, c, g, or t
  misc_feature (899)..(900): n is a, c, g, or t
  misc_feature (904)..(905): n is a, c, g, or t
  misc_feature (908)..(910): n is a, c, g, or t
  misc_feature (913)..(914): n is a, c, g, or t
  misc_feature (918)..(918): n is a, c, g, or t
  misc_feature (921)..(923): n is a, c, g, or t
  misc_feature (925)..(926): n is a, c, g, or t
  misc_feature (929)..(929): n is a, c, g, or t
  misc_feature (937)..(937): n is a, c, g, or t
  misc_feature (939)..(939): n is a, c, g, or t
  misc_feature (941)..(941): n is a, c, g, or t
  misc_feature (943)..(943): n is a, c, g, or t
  misc_feature (946)..(950): n is a, c, g, or t
  misc_feature (956)..(956): n is a, c, g, or t
  misc_feature (959)..(960): n is a, c, g, or t
  misc_feature (963)..(964): n is a, c, g, or t
  misc_feature (966)..(967): n is a, c, g, or t
  misc_feature (970)..(970): n is a, c, g, or t
  misc_feature (972)..(972): n is a, c, g, or t
  misc_feature (974)..(975): n is a, c, g, or t
  misc_feature (977)..(978): n is a, c, g, or t
  misc_feature (980)..(980): n is a, c, g, or t
  misc_feature (982)..(985): n is a, c, g, or t
  misc_feature (990)..(990): n is a, c, g, or t
  misc_feature (992)..(993): n is a, c, g, or t
  misc_feature (1000)..(1001): n is a, c, g, or t
  misc_feature (1003)..(1003): n is a, c, g, or t
  misc_feature (1007)..(1011): n is a, c, g, or t
  misc_feature (1016)..(1017): n is a, c, g, or t
  misc_feature (1020)..(1021): n is a, c, g, or t
  misc_feature (1026)..(1027): n is a, c, g, or t
  misc_feature (1029)..(1030): n is a, c, g, or t
  misc_feature (1036)..(1036): n is a, c, g, or t
  misc_feature (1040)..(1040): n is a, c, g, or t
  misc_feature (1043)..(1043): n is a, c, g, or t
  misc_feature (1049)..(1049): n is a, c, g, or t
  misc_feature (1051)..(1052): n is a, c, g, or t
  misc_feature (1055)..(1055): n is a, c, g, or t
  misc_feature (1057)..(1058): n is a, c, g, or t
  misc_feature (1061)..(1062): n is a, c, g, or t
  misc_feature (1066)..(1067): n is a, c, g, or t
  misc_feature (1069)..(1075): n is a, c, g, or t
  misc_feature (1079)..(1080): n is a, c, g, or t
  misc_feature (1083)..(1090): n is a, c, g, or t
  misc_feature (1093)..(1093): n is a, c, g, or t
  misc_feature (1098)..(1098): n is a, c, g, or t
  misc_feature (1101)..(1101): n is a, c, g, or t
  misc_feature (1106)..(1107): n is a, c, g, or t
  misc_feature (1114)..(1116): n is a, c, g, or t
  misc_feature (1118)..(1118): n is a, c, g, or t
  misc_feature (1120)..(1121): n is a, c, g, or t
  misc_feature (1124)..(1127): n is a, c, g, or t
  misc_feature (1129)..(1133): n is a, c, g, or t
  misc_feature (1136)..(1142): n is a, c, g, or t
  misc_feature (1145)..(1146): n is a, c, g, or t
  misc_feature (1150)..(1151): n is a, c, g, or t
  misc_feature (1153)..(1155): n is a, c, g, or t
  misc_feature (1158)..(1158): n is a, c, g, or t
  misc_feature (1161)..(1161): n is a, c, g, or t
  misc_feature (1166)..(1166): n is a, c, g, or t
  misc_feature (1168)..(1168): n is a, c, g, or t
  misc_feature (1171)..(1173): n is a, c, g, or t
  misc_feature (1175)..(1176): n is a, c, g, or t
  misc_feature (1179)..(1179): n is a, c, g, or t
  misc_feature (1182)..(1183): n is a, c, g, or t
  misc_feature (1185)..(1188): n is a, c, g, or t
  misc_feature (1190)..(1190): n is a, c, g, or t
  misc_feature (1194)..(1196): n is a, c, g, or t
  misc_feature (1199)..(1200): n is a, c, g, or t
  misc_feature (1202)..(1202): n is a, c, g, or t
  misc_feature (1204)..(1204): n is a, c, g, or t
  misc_feature (1207)..(1214): n is a, c, g, or t
  misc_feature (1217)..(1218): n is a, c, g, or t
  misc_feature (1220)..(1222): n is a, c, g, or t
  misc_feature (1225)..(1225): n is a, c, g, or t
  misc_feature (1228)..(1228): n is a, c, g, or t
  misc_feature (1231)..(1233): n is a, c, g, or t
  misc_feature (1237)..(1238): n is a, c, g, or t
  misc_feature (1243)..(1244): n is a, c, g, or t
  misc_feature (1248)..(1248): n is a, c, g, or t
  misc_feature (1254)..(1258): n is a, c, g, or t
  misc_feature (1260)..(1262): n is a, c, g, or t
  misc_feature (1267)..(1267): n is a, c, g, or t
  misc_feature (1270)..(1270): n is a, c, g, or t
  misc_feature (1272)..(1275): n is a, c, g, or t
  misc_feature (1277)..(1278): n is a, c, g, or t
  misc_feature (1280)..(1280): n is a, c, g, or t
  misc_feature (1282)..(1283): n is a, c, g, or t
  misc_feature (1285)..(1285): n is a, c, g, or t
  misc_feature (1289)..(1291): n is a, c, g, or t
  misc_feature (1294)..(1294): n is a, c, g, or t
  misc_feature (1296)..(1307): n is a, c, g, or t
  misc_feature (1309)..(1309): n is a, c, g, or t
  misc_feature (1312)..(1312): n is a, c, g, or t
  misc_feature (1317)..(1317): n is a, c, g, or t
  misc_feature (1319)..(1319): n is a, c, g, or t
  misc_feature (1323)..(1323): n is a, c, g, or t
  misc_feature (1328)..(1329): n is a, c, g, or t
  misc_feature (1331)..(1331): n is a, c, g, or t
  misc_feature (1333)..(1334): n is a, c, g, or t
  misc_feature (1339)..(1342): n is a, c, g, or t
  misc_feature (1345)..(1346): n is a, c, g, or t
  misc_feature (1353)..(1355): n is a, c, g, or t
  misc_feature (1357)..(1358): n is a, c, g, or t
  misc_feature (1361)..(1362): n is a, c, g, or t
  misc_feature (1365)..(1365): n is a, c, g, or t
  misc_feature (1367)..(1367): n is a, c, g, or t
  misc_feature (1370)..(1371): n is a, c, g, or t
  misc_feature (1373)..(1375): n is a, c, g, or t
  misc_feature (1377)..(1377): n is a, c, g, or t
  misc_feature (1379)..(1383): n is a, c, g, or t
  misc_feature (1385)..(1385): n is a, c, g, or t
  misc_feature (1387)..(1387): n is a, c, g, or t
  misc_feature (1389)..(1394): n is a, c, g, or t
  misc_feature (1396)..(1397): n is a, c, g, or t
  misc_feature (1931)..(1931): n is a, c, g, or t
  misc_feature (1988)..(1988): n is a, c, g, or t
  misc_feature (1991)..(1991): n is a, c, g, or t
nnngnnnnccncnngnncgnnnngnncggcgnncngngngnngnggncnngngngnnngnctncnncgcgncgncnnnngcgnnccgaancncnnnancnanggngnnanngcnnncgcngnnnngncncnccnnggtgacnnngnncancgacnnnngnntnttncgcangnngtgatcgncnagnngtncgngngnannnnngncgnnnnggccgccnngnnccgncnnntcagcnnccncntngcnnncaccgnnnngcagggncngnnngtgnnngcggtcnnntnnnccnnggnncannccncngntcgnnnnancgnnctngnnnngngcgtcnncnncnnancnnccncgcncgancncnncatgnnggncncnancngcnagncgntcaccgcgnnncnngncnccnngngnntcnnggnannggnngngnnggcnnnnnngnnnnnnggcgnncnggncnncgnncgcancnncgngnncnnnncncnngncnncanncgcgncnncannnccgnnnncntcanngngnnnntnnncnngnaccnnntcncngtcnncnccgncnncnagnngnncnccnnnnagnnggannnnannannnnnngcnnngnngnntcggncnncnccgnnnnnncncnngcngnggcnctnggggcgnngncntgcgngnnnnncnncgnnnncnnnngcntcnncnccgcggncncnnngntnntgannnccgngnnnnngntnnnncacnnccagtnngncnnannnntcgngcnngnannnnncggngcncnnntcancnanccnngngcgnncgannncgnngngntgnnnnnngngnnnntcnannngcgcnnnnncnnnggcgnnngngtngnnncgatgntnnnngnncnngnnccgnnggnnnacnnccancgnnngnncgncatcgcgnangngnaannnnncgcgangannacnntnntcngngnncnngncnnnncgggngnngcggcgnngntctnnnnnccgcnnggnncggcnngnntttcgntggncgncatcgngnngancnncgnncgcnncnnnnnnnccgnnctnnnnnnnncgntcgcngantcggnnttgaagnnngngnngannnngnnnnnggnnnnnnncannacgnngnnngcnacncgggncncgnnngnnggnggnntnnnnangctnnncanngncngcnnnnnnnngcnngnnncgncgngcnnngcgnnccggnngttncgggcnnnnncnnncgcgngcntnnnnanngngnngntcannncgncnnnnnnnnnnnncncgngcatngncgcncgcgnncngnncgacnnnngcnngcggatnnngnncanngcntncgnncnnnancnnnnncngncnnnnnngnngcggcacctcccgtgccggtaaacgttgcgatcgtcggcccggccggggctggcaagaccacgctgttcaacgccctcacctccggtcgcggagccgacggggtgggcatggtcgacatcccggaccagcggctcacgcggctggccgaagcggtcaagcccgccaagacaactcccgcccaggttcgggtcgaagactcgcctcccggaagccgcgcccagcgcgtggccttcgcgcgccaggcagacgtcctgctgaaggtcgcccgctgcttcggccccgaccctgatcccgcggcagagctggaagagttcgcactcgacctcgtgctggctgacctggcctcggtcgaaaagcgtctcgagatagtggccaaggaggcgcgcgcaggcaagaaggatgcgcaggccgagaccgaggtcctgaccgccgccaagcagcatctcgacgcgggccagcagcttcgcaccctgcagctcgagcccgatcagcgcgcgatgctcgcggggatcttcccggtcaccctcaagccngccgtgtacgtcgccaacgcggcggaggagctgctgcctggcggggccgagcccgcngcnaaggtcaaaaggctggccgatgccgaaggcgctccgtcgatcacgctctcggcgcgcctcgaagccgagctggccgagctcgatccggcggagcaggccgagatgcgcgcgggctacggcatcgatgagtcgggcctgggccggatcgcgcgcgccgtttgggagacgggcggcctcatcacctacttcaccgccggcgagccggaggtcagggcatggccttgcgagcgcgactcccccgccccggtggcggcgtcgaagatccacacggatttcgagaagcacttcatccgggccgaggtcacctcagtcgatgagctggtcgccgccggatcgatggaggcgctccgcgccgccgggaagctccgggtcgagggtcgcgagtaccgggtcaaagacggcgacgtgatcttctttcgcatcggtcgctgaggcgttccgactcccaggtcaggagattccgtaggcctggcgcgtcgaccgccgcagcaggatgatcaggatcgggatcccaaccaggaccacagaccagccggccgcaacgatgaccgcggcgatccatccccagattcgcaaacgcctcagaccgtagtaggcggcgccatgcaggaccgcggccgcaagaccgaagaaaaagatcatcaccgactcgccggccagcgccgtgttgacgttgcccgtgaatccgccgttgacgagcgcctgggtgagcacgtcacgcccggccggcgccgccaggtacgcaccgaatcgggtcagctcgacgagccagaaaaccgcaccggcggcaaagaggtagggcagccaccgcatgggcccggtctgtgccggcggtctagattgcaagctcacgccctatcgtccgaaagatcttgacaacaactacattcggggttataactgcatccgggacacaacatatcgtagcccacgaaccagcaggttgagtcccacggcccaacgacaggcaggcggaacccttcccgagtcgcaccccacgacccagcaccagctcccctacccgcctgcctgttctattcacctccccaccctgtggggacgtcgccccagcctcctccccatttatggggaggtggcccgaagggccggaggggccagcggtctcggccgggtggggggattcaaatgcgattaacctcccaccctgtcgggcgggtggggcgaatcgagctggctttcacgccgtctagacttgcagatctatgagtcgcaagggcaagaagcgagccaaaggcaaattccgccagccgatgcgacctcccggcccgctcacgggcgtggcaacggcgggcgccggcgcccagacctcgaccgtgtcgaggagcgtgtcccaggcccgcgtcggcggtgaccaggcgatggtgcgggccgtcgagatgtcgctgggggggcgcaaccagatcatcaaaggacgcggcggcaggttcatcgtcgagtccgccgacccgtcgattccgctcgaccgcgtcccttacttcaccaaggacctggtgcggctcatggtggtcggcgcggccatgatcgtcctgctcgtcgtgggttcgctggccgtgcccctggtcgtcaagtaggcgtcacgatccctcgctccgtcgagtcgctggtggagcgaaccgtcgaggacaaccacggcaggcagcaggtggaaatcgaccgcacgtaagattcgcccgtgcgggtagtccttttcaccgggaaaggtggcgtcggcaagacatcggtcgccgcagccaccgccgtgcgctgcgccgccgccgggtatcggaccgtggtcatgagcaccgaccccgcgcactcgctgggtgactctttcgacctcgagctcggcagcgactcggtccaggtcggggacaaactgtgggcgcacgaggtttcatcgctccacgagatgcagcgtcactgggccaagctgcacgagtacgccgtcgaggtcttttccacacagggcctcgacgaggtgctcgccgacgaggtcgccaatcctccgg

SEQ ID NO: 1669 - DNA, 4000 bp, Escherichia coli
  misc_feature (3263)..(3263): n is a, c, g, or t
  misc_feature (3534)..(3534): n is a, c, g, or t
  misc_feature (3692)..(3692): n is a, c, g, or t
  misc_feature (3722)..(3722): n is a, c, g, or t
  misc_feature (3734)..(3734): n is a, c, g, or t
agtagggaatgcaacaaattcctcgaaaacgcagagcaacgtatagaaaaaatattaaagaatgaaaatggtgagtacgaacaaaaagaatttgtactcgactgaagaacacggtttgcggaaaatgtccgtaaatcaaaactaatatttcagagatgttctgtctccccttgatggaaagaaagaatgggggatgctgatttctgattactgaattctagaaaataaaactgcaagtctacgcaagctcaagcgaatgctgggttgtactgttcaatgtataagtaattgcgtcactacggttcctcttttcgatttctgatctgtaaatcaaatatttgtcagaacatcctgattttaaactcataaaaatcaggtaaaaaatgacagaagtagataataaaatcctcatcaatgtagaggatgacgaaaccagaattgcgttattacacggcaataagctggataacctttacattgaacaaactcaccgctcccaaaaagttggtaatatttattgcggtaaagtaataaaagtacaaccttcctttcaggcggccttcattgattacggtgaagaacgtcacggtttcctttccctttccgatataaacttccaagtctataaaccaaaccgtgaaggacgcggacggccttccatcacacaggttcttaaacccggacaaaaaattctggttcaggtaatcaaagatgaaattggacacaaaggcgcgtcaataaccacaaacatttctttggcgggacgttttcttgtttttatgccggacagtgaccgtggcggtgtttccaaaaaaattgaagatgaagaccaaagggcgcgtttgcgtcacttactgaaaggtctcggaagtgaaaattcatcagctattatccgtacggttggagttgatcgttcgctcactgaattgaaacgtgactacacgattttacgccgtacctggaatgaaatcaaagacgagtacgaagagcaatcaactcctggcatactctatcaggaagaagacgcgatgctgcggatgatccgtgattattacaatgacagtatttcggaagttgtgattgatgaaccggttgcatttcaacatgccttggagttttttaaaactcatatgccggcagaacaaaataagctgcagctttatcttggcgaaaaatctcttttttcaacttatgatattgaaggccaaattgaagtactgcatcacccgcaggttcctttgccttcaggcggttcattagtcatcatgcctacagaagcacttgtggcaattgacgtcaattccggaagatccactcaagaaagaaacgttgaggcaaccgcattacgtacaaaccttgaggctgcagatgaggttgcaagacagttacgtttaagaaacctcggtggtttgattgtggtggattttatcgatatggaaaactctaaaaaccgccttgctgtagaacaattaattgaagaagaaatgtcttcagacaaggccaagacttcgtttggcataatttccaaattcggattattggaattaagtcgtcagagaattgccagcagcttgtcacttaattctattgaaatcactttagcaaacaggattttacggaaaattcatgattccgcaattgaacaaaaagtgatgcagatttacctcagactgcctttaaaattggcgacccatctgctcaatattaagcgccaacgtttaactcaaatggaaatggattacggaatccgcatttcaataactcctgacactttacttggagttgaagaaattccggaaatggaagttactttaaaaggacagagcggaggagaaaccagaacatccgtgccaatttccgcctctgatatgcgtgacgataaaccaggcaggaaaaaaggtcgtgctaaaaaagagcaggacaaaaaagagtttgataaaaaggacgattccgtaactgttaaaagttctccggaaaagaaaacagcggatgaacagcccaaatcaacagaaactcctgcaaagactttgtcgaaaaatgaagagctaaagtccgctaaagagtccagagtgaaaactgaacttccggatacaactgctgaagcgaaaaagggcgctgaagagtcatcaataaaggatccgcaaaaaactgctgaatccgataaaaaaccagcaggaatcagcaaaccttcaacagcaaatgcagaaaaaacagaagaaacggtagtactttttaagagtagccatgaacctgtaaaagcagaggttgctccgaaaaagatcatctcaactcaggaaaaaattgctgagaacaaggacgaacctactgttgcaacttatacaagtgttcacctcgaagatcagcagaatttaacagagaaaactaaaattgttgctgctaataaaacagtaaaagaagatactgcagaaacaccaatgttcagtagtgttcatttaggcgatgcagaaaaaaaagccaaacagcttgctgcaaagcaggactctaaagctccgccagcagcagataaaacggcgccagttacggataaaaagtctgtaaaatctgctccgcgtaaatcaactgcaaaaaaacctatcgctaaaaagacggattccgcaaaagtctccacaaaagcacaacccaaaaaagcgaaagtagattctgctgaaaagtccgtagcaaagtctaaatcggctcaaagtaaagtctctgctgcaaaaaaggattctgcaaaatcagcaactcccaaacgtgcagaacaggataagaattctcctgtgaaatcgcttaaaaccacaaaacctaagccaaaggcaaaaattcctcagcagcagcaagataagcccgtaacaccggctgctgctcccaaagcagaagagtctgctgcttaaggccactgataaagtttccagggcataatgtcttaccaaaaccttccgtccatcacagagtgtgatgcgtttctcaaggaacaaaagctccctcacggcaaagcagtcagggagcaggtaaacatcgtgctggatcagctacgatcagaaatttccaaaaatccacacaaagctgtttcaactgccaatgcagaaatattggagcgtgttgcagcacaagtccgcaatcaatctcagaccacccaaagagtaatcaatgcaaccggcgttgtagtacataccaacttgggccgagctcctttgtccgaagttttgttacgcaaagtattacccggcatgagttcctactctaccttggaatttgatctcagnacgggaaaacgcggttcacgcgatgcaaaaatccgcaaactgctgcgtaccctttctggtgcagaagatgcgatggtggttaacaataatgccgctgctgtgtttttaatgctaaaggcattgaacggaaatgagactgaaaacaaaaaacctgaggttattgtctccagaggagagttagtagagattggtggatctttccggattcccgacataatgcgtgaagcaggagtcaaactggtagaagttggtacgactaaccgctgccganttgcggattatgaacaggccctcacagaaaacaccgctgctctgttaaaagtacatccttcaaattacgaaatccaaggctttacggaagaggtttccgttgaaaaaatggcacagctcgcacactcaaaaggtctgctttgctttcatgattggggnagcggcagtttttacaagttccgccaacgnggtttgagtgantattcaactgcggaacaggaactctcagccggtcctgatttgctggccttcagcggtgacaaattgctcggtggaatacaggctggtgtgttacttggaaaagctgaaaatattcaaaaactgcgtcagcatgctctctatcgagcattacgtttagacaaagtgacacttgctttgtttgaagcaactttggaagcatatcttgatttaaaaactctagcggaaaatgtgcctactgtcggactgcttgaactgacacgcgaaga

SEQ ID NO: 1670 - DNA, 4000 bp, Escherichia coli
  misc_feature (771)..(771): n is a, c, g, or t
  misc_feature (1286)..(1286): n is a, c, g, or t
  misc_feature (1570)..(1570): n is a, c, g, or t
  misc_feature (1985)..(1985): n is a, c, g, or t
cggacccgtcggggagccacgcgggggcgcgatcgttgccgaggttgaacgtgatgcgtcggggcgagccgccggcgaatggccgatccgacccggtctccgggccggcaaacggagcgctgtgttcgcagccggcgaaggcgagcgcaacaacgaccgcggcattcaagcggcgcatgggagcgggtggaattgtacgcggaaaccgcgtgacaagaaaccgggcgatcagtatcgttgcggcgtgatgccggaattgcgcgtcctccgaccgggcgacgaggtggtgctggacgcgttcctcgcccgccacgcggacagctcgatgttcctgcgatcgaatgcacgcgcagccgggctcgtcgaccgcggcgagcccggacaggggacctacgtggcggcgttcgagcacggtgtgatcgtgggcgtcgcggcgcattgttggaacggcatggtgctggtgcaggccccggggcacgtggcgaccctcgcccgcgaggcggtacggcgctccggtcgcacagtggccggcttctcaggtccgtgggaccaggtcgtcgccgcgcggcacgcgctggggctcagtgaagggaccacgcgcaaagacagccgcgaagacctctacaccctcgagctgcggcatctggtcgtccccgcggccctcgcggccggacaggtccgctgccgccaccccgaggacgcagagctcgatctcctcgtccagtggcggatcgccttctcggtcgaggcgctgggcgcgaccgccacccncgcgctggagacggcgtcccgggcggacgtgcggctgatccacgaccgcggggctgactggctgttgctcgacggcgcccggcctgtcgcgtactcggcgttcaacgcgatgctccccgaaatggtgcagatcggcggggtgtggacgccgaccccgctgcgggggcgcggctacgcccgcgctgtagtcgcggggtcgctgctcgcggctcgcgagcggggcgtcgagcgggccgtgctgttcgcggatcccctgaaccaggcggcccagcgcgcctacctgtcgctcggctttcggatcgtcggagactacgggctcgtgctgctggacacccgctaaccgagctacaccaccgccgatagattgagcagcgcgcgccacgcgcggaacacctcgcggtagtcctggtgcgtgaacgcgacggtccggcccgccgtccgggtggctccggggcacagttccgccatgtcggcgtggatcgtcagcgcgaaatccacttcgagggtggtcggcngggggagcacgaacggcgcgtgtttccgttgcagcgccgtcgtcacgccctcgcggatcatgcgacaggcgaccgccggcgcgacgctgcgtgccgcgtgacggctgaccgcctccttcacgacgaccacggccacgtggtcgcccagcagctcccgcgcctcggcggcgagggcggaatcgccgctcacgagcgccaccggcacgccagtgacaccggcgaaccctgcgttgatgccgagctcgccgaccggacggccgttgaggcgtacttcatggatacgntcggcgtaggtgtggtcgaggatcgcgttgcgcgtgccggcgcgggcgtggtagccgatgaacagcgccgcgtcgaagcccccgtctatcccctccaccatagagcgcggcttggggtcgcccgccaggagctcggccgcctgatgcagctcttcggcgagcaggttgcgcatgaaccagtggctgtcgttcaccacgatcttggtggcgccggccgccagcgcgccctcgatggcagcgttcgcttccgccgtcatgaggcgtcggaagcgggcgtactcggcggcgcaggcgggattggtcgggtcggtctgggactcatgcacgacgccggccacaccttccatgtcgacggagacgtaaacgcgcacgggtgactctcagggaaggtgtggtgtcgcgacaagggcagccnccaaagctaggatactttgcactataaagtacttgacgcagacgggtgcggcgagttatcttggcacgcatgacctccccccgtcccctgcacgaccgcgccctcgacaacctgcgctacatccggcagacgatggagcgcgccggatcgttcacggcggtgcccgggtggggccagatcgcggtcggggcgaccgcgctcgccgcggcggtggtcgcggcacgacagccgacgcccgaactgtggctggccacatggctgggtgaagccatcgtggcgctcacgatcggcgggtggacgatggtgcgcaaagcctacgccgtggacgaccctatcctctcgggaccaggtcggcgtttctggctcagcttcctcaccccgatggccgtgggcggactgctgacggtggtgctgtaccgtgccggtctgtggcacgcgctgcccgggacgtggctcctgctgtacggcacggggttcgtgacgggcggggcgttctcggtgcgggtcgtgccggtgatggggctgtgcttcatgatcctcggcgccgtggccctgctgggaccgcccgcctggggaagttggtgtttggcggccggattcggtggcctgcacgtcgcgttcggcgggatcatcgcacggaggtacggtggctaagccgggagcggtacgcaagacggatacggtcgcaccgccgctgcgcggcgaacgtgcgctgcgcgccgccgagctggaccggctgatccacgagcgggtgcgcctcggcatcgtgagtgcgctggcggtgaacgacgcgttgacgttcaacgacctgaaagcccttctcaggacaacggacggcaatctgagcgtgcatgcccgcaagctcgaggaggcgcagtacatcagctgcagcaaatcgttcgcgggccggatccccaagaccgagtaccgtttgacggcgctgggccggcgcgcgctggagcgctacctcgaccatatggaagccctgatccgcgcgacccgccagggctgagggaattttttttgaggcgagactttatgctgcaaagcacttcactccacgtcgcgatcattatggacggcaacgggcggtgggccgcccgccgcgggctcccccgcgccgccggccaccgcgcgggcgccgacgccgtccgccgggtggtggaagcggcccccggccagggcgtcgccgcgctcacgttgttcgccttctccgccgacaactggaaacgcccccccaccgaggtggcggcgctgatgcgactgttcgcccgtcacctgcgcaccgaaacggcccggctggtcgccaacggcgtccgcctcgaagtggtcggccggcgcgaccgcctccccgccccgctcgtcgccgccatccaggcggccgagctcgcgaccgccggcggaaccgcgctccggttccgcctcgccgtggattactcggcgcgcgccgcgatcccggccggccagctcctccccgacgtggatctcttgattcgcacgggcggcgagcagcgcctctccgactttctgctgtgggaatgcgcctatgcggagctgtacttcaccgaactcatgtggcccgatttcgcggcggccgacctggcggacgcgctgcgcgcgtttcacgcgcgccagcgacggttcggcgggctgccggaagcggccgccggatgagcgcgctcaccgagcgaacgaggctcggcctggaggtattggctacgggcgtcgtcctggggatcgcgggcgacgcgctgctgcgcgcgacaccgtgggggctgaacgcgttcctctgtactgtggcgcttgcggcggcggcggcgtggctggtgtatcgccggcggatcgcggtcgggcgcgacgcgccttggctcgcgatggccgccgtgctgctgggctcgaactttgcgatccgcgactctgacgcgctccgcgcgctcgatgcgatgggcctcgcgatcctgctcgcgctggccggtttcagcctgcgcggcgtcgcgctgcgcggccgcgacgcc

SEQ ID NO: 1671 - DNA, 4000 bp, Escherichia coli
  misc_feature (1951)..(1951): n is a, c, g, or t
cgcatcctgcagcgccgtgcgcacaaccttagtcgggtcaacaatacccgccttcaccaagtcagtgtaggtctccgtctgcgcatcaaagcccatggagccgcccttgccttcgagaagctttccggccacaacagcaccgtcaacgcccgcattctccgcaatctggcgaaccggcgcctgaagcgcacggcggacaatgtccacaccaacacgctggtcgtcatcttccaccttcagcttgtccagaaccttcgtggcatacagaagagcgcaaccaccgccagggacaatcccctcctcgacagccgcccgcgtcgcattcaacgcatcgtcaacacgatccttcttctccttaacctcgacttccgtcgcgccgccgatgttcagaacggcaacgccgcccgccaacttcgccaaacgctcctgaagcttctcacggtcatagtcggaagacgtctcttcaatctgagcccggatctggttgcaccggccctcgatgtccttcttcttgccggccccttcaaccaccgtcgtctcttccttggtgatcgacacccgtttggccgaacccatcatgtcgaggctgacgttctcaagcttgatgcccagatcttcgctgatcacctgaccagaggtcaggatcgcgatatcctcaagcatcgccttccggcggtcgccaaagcccggcgccttaacagcagcaaccttcagaccaccgcgcagcttgttcaccaccagcgtggccagagcctcgccttcgatatcctcggcaatgatcagcagcggacggcccgactgaaccacagcttccaataccggcagcatcgactgcaggctcgacagcttcttctcgtggatcaggatatacgggttgtccagatcgcaggtcatcttctccgcgttggtcacaaagtacggggacgtatacccacggtcgaactgcatgccttcaacaacatcaagctcgctgtgcaggctcttcgcctcttcaaccgtgatcacgccttcattaccaaccttcgacatggcgtcggcgatcatgttgccgacttccttgtcgccgttggccgagatcgtgccaacttgcgcaatctcttccgacgtggacacccgcttggactgcttggagagatcggcaacaaccgcctcaaccgcaaggtcaatgccccgcttcagatccatcgggttcatgcccgccgcaaccgccttcgcgccttcacgcacgatcgcctgcgccagaaccgtcgccgtcgtcgtgccgtcaccggcctcgtcattcgtcttgctggccacttcacgcaccatctgggcgcccatgttctcgaacttatcagaaagttcgatctccttggccaccgtaacgccgtccttcgtaatgcgcggcgcgccaaaagacttatccagaacaacgttccggcccttcggacccaacgtcaccttaaccgcgttcgcaagcgtatcgacgcccttaagcatcttcgcgcgagcatccgcctcaaactttacttccttcgctgccattgtcttgttctcctacaatgcagaattaaaaaaaatagccgccacccgatggggttaagcagctttcttcttggaaaccttggcttcgataatgccaagaatatctgattcacgaaggatcacgaggtcttgcccgtccaccttcacttcggtgccgccaaatttgctgaacagcacccggtcgccggctttcacatccagcggggtgactgaaccgtcatcggcgcgcgcaccggcgccggtggcgacaatttcaccttccgacggcttttctttggccgtgtccggaataatgataccaccagcggtcttttcttcctcgtcgatacggcggacgagaacgcgatcatgcaatggcttgaaacccattgtttcctccaaaatatctatccagaatccccgcttccccagctgtgcgcctcccccnggcgggcatttagcactcggagagcgagactgccagggtatttagtcccctcgttcagacagtcaaccccttcaaaacaaaaaacttttcagttttttcgggatttttttagcactctcaccggagtgctgataaatcattgaaaactataggcatttggaggaatcggggtatcttaaatgtgacgtgtcgactttagacggaggttttatatgcgaccgcgttccgttgaactgcagctcaagggctatcggctgacgacagccgagatattgtaccacctacccgattatccggaactcctgcaaagctttgtctggcaaaacttggatatggccccaagtttcccccgcctcaagaaattcctcgatcactgggaaacccagttggaaggcgctctgcattctgtccgtgtggccaacgcgcaactgatcaagccggccgagttccggatgatcgagaataactggacgttgcattaaggccggtcaatccagctcggtggtgagttccctgccctgccggtagcgccggtagagataaacgccgagcgcggcggagatgacaaagagcacgatgctaacggtgatgcgcagttcctgctccacgccgatgccgctgccgagcaacgcgaagattaccgtctgcgggatatagccgagcgccgagccggtcacaaaggccaccgcgcccgccccggagacgccggccaccagattggtgacaaagttgctgccgagcggcaacaggcggatcaacagcgtcgtggcgaacgtattctcccgcaggaaatcatcggcaatttgcagccgcctcggaaacttgcgggacacatagtcccgcccggcaaaccgggcgaagctgaaggaaatgacgcaacccatggccgtcgccaatagggcgagaccggagcccagcaccaaaccgaacgcatagccacccatgaaggaaatgatctggcgggggaatccgaccgagaccaaggccgccgagccgaacagatagatgagttccccacgcaagcccgcgccgcgcacattcgcgtcgatccactcttcggtaaaaagttcgccgaaccagcctttctgaaccgcgaacccgacccccaccagcacggcgatggtcaccaaaccgcgcagtacgtttttcaccagcggggtcatgcgtcttcggaatccccgccgatcttggaaacgtcggggttcaccgggcgcgtccgcagccaggccacaccgcggatatcctttagacccacccacagccggtcaaacgtgccgtagttggatttgccccgctcccgtggccgatggttaacttcgaccgagaccacccgtccgccgtggcggatcatcagggccggcaggaagcggtgcatgtgattaaacgcgggaaatgccaggaagtcttcgcgccggaacaccttgagcccgcaacccgtgtccggcgtcgcgtcccccaaatagcgggagcggacgccgttggcgatcttggacgacatgcgtttaacaaacgtgtccttgcggcccttgcgccagccggcgatcagcaccttaccgtccgacgaagcttgttcccggtatgcggctatcagattgggaatatcagcgggatcgttctgcccgtcaccgtcgagtgttgcgatcagcaacccacgagcgtgagagacgccagtatgcaccgcgacgctttggccactttggcgcgcgtgttggagggcgcggaagttaggaatttcccgggccacggcggccataacatcagatgacgtatcggcgctgccgtcattgacgaacaccatctcgaaggccggaccatctttcaacgcggcgacgatttcgtcgaccaacgggcggatgttatcggcctcgttatgcacgggcacaacgacactgaggtccggcggattgtgtttgtcactttggctcgacatggacttccggtaatacactccacgcccgagactgaaaagaaaattgcggcccggcgtaggcattgtctgattttgacctttgtggcacgctcacgccaatcatcgagcaaggagacact

SEQ ID NO: 1672 - DNA, 4000 bp, Escherichia coli
  misc_feature (1015)..(1015): n is a, c, g, or t
  misc_feature (1021)..(1021): n is a, c, g, or t
  misc_feature (1108)..(1108): n is a, c, g, or t
  misc_feature (1139)..(1139): n is a, c, g, or t
  misc_feature (1180)..(1180): n is a, c, g, or t
  misc_feature (1582)..(1582): n is a, c, g, or t
  misc_feature (1987)..(1987): n is a, c, g, or t
  misc_feature (3138)..(3138): n is a, c, g, or t
  misc_feature (3156)..(3156): n is a, c, g, or t
  misc_feature (3297)..(3297): n is a, c, g, or t
  misc_feature (3501)..(3501): n is a, c, g, or t
tacaattccagaaggtagtaatcttaatttataagttgttccatcaattactaatgtgtgtccagcattgtgtcctccttgaaaacgaataacaacatctgcttggtctgatagccagtcgactattttaccttttccttcatcaccccattgagatccaacaactacaacatttttcattatctaaattttttttctattgttactgaacttaaatggttgataggcccatgacctttaccgaatttaaggtttgaatttattgaattgtgtacatacttagttgcaagctcacaagatctctttaaggtttttccacatgaaaagaatgtagaaatagcagaagaaagggtgcaaccagtgccatgtgtattcctggttgtaattcttttattttttataatgaaaatttcatttttgtttacaaaaatatcttggacgattttagattctaaatgaccaccttttataaaaacattttttgctcctaattttattagtatgctggcagcaaaaatcatatcttcttttgttcttattttagttttagttaatatttcagcttctggaatatttggagtaattaggctaacttttttaattagttcattttttaataactgaattgccttatcatcaataagttttgcaccacctttagctaccataacaggatctaaaattatttttttaactttaataagatttaatgaatgaattactgattttattacttttgtagaatgcaacattccaatttttatggcatcaggtttaatgtcttttgaggtaaattctatttgatttgaaatttccttaggatcaattggtactattgattttacacctgttgtattttggattgtgacagctgttattgctgtcatggcatacgaacctaaagctgtgatagttttaatatcagcttggatgccagcaccaccagatgaatctgatccggcaataactaatattttagattttggtttcaatttatttaatttttcttaaaacnattttnaaacatttttgaagcaatttaatattatcactctctcccattactctgattttagactccgttcctgagcttctaactaatattctnccttgacctttaattaatttttctgctgatnttatagaatttttaatatcaatatttttaattatatttttntctttaacatcaatattttctaatatttgtggagttttcttaaaggtattaaaaaaactactagctttttttccttttcttaatgaaaataaaacttctaaagcaactaataagccatctccagtagttgcaaatttgcctagaataatatgcccagattgttcaccacctaaattaaaattatttttttgcattttctcttttacaaagcgatctcctacatttgatcttaagaattttatattatgtagtttaaaaaacttttctaatccatagttagacattaaagtgccaactacacctccttttaacattttttttcttttccatctcattgctattgcagcaattatttgatctccatcaattacaatacctttttcatcacacataataattctntcggcatctccatcaagtgaaattcctatatgtgctttatatttctttactgctaatctgattttatttggaaaagtagatccacaatttttattaatattaagaccattaggatttattccgattgaaaatactttagcacctaaagattttaataattcaggcccagccttgtatccagccccatttgcacaatcaatcactattcttaaacctcttaggttaaaatcttttggtaaattattttttaaaatttttatataatctttatttgcagtttctaacctttttacacgacccaatttttttggttttgataaagatttttcaattttttgatcaattaaagtttcaatttttttttcaattttatttgacagttttaacccatctggtccaaataantttaacccattgtcatgatatggattatgagatgctgtaatcataattcccatgttagctttcatactctttgtgagcattgctaagccattagttggaagtgggcctaatgtataaacgtgcataccagccgatgtaagtcctgatactaacgcaggttccaaactataccctgagagtctcgtatctttagcaattattgctatttgtttcttttttttttgagttttaaagtaagttcctgttgcaagaccaaatttaaaaaacatgtctccattaatatttttactattaacggcacctcttattccatctgttccaaaatatttttttgccattagtttttaattaattctttaaacacctttatactttgtcttaattcattcacatcatgaattcttagaatttgaactccttgcattattgcatacatggaagaagctactgttccacctaatctttccttgctatcattttttccagataaatccttaataaattttttcctagaaagtccaagtaatataggaaaaccaagagtatgaaaaatagaaacgcttctaattaaattcatattatgtttcaaattttttccaaaaccaattcctggatcaattacaatattattatgttttatacccatggatcttaaaaatttaatcttttgttcaaaaaaatcataaatatctaataattcatttttgtacttagggtttttttgcattttttctggtgtaccttgtgaatgttgaatgacaaatggagttttgctttttatcaataccttaactgttttagggtcataacttagacctgacacgtcatttataagtttaactcctaaatgaatccctttaatcataatttctgattttcttgtatctaatgatagtggaatttttttattaacatcttttaatatttcttttattctattccattcttcctttttacttacaggtttagatccaggtcttgttgattctccaccaacatcaataatatctgctccagatttaaataaattctttgcatgagatattccttttttctttttattaaatttacccccatcagaaaaactatctggtgttaaatttaatatacccattatattaggtattttattaaaatttaaacttgaaaantttttattttttttaacnatagtcttgagatctttattaattttttttttcagtagtttgggtaatttttttatatctttaagatcaatttttttgatagaagttcgtgtaagaatttcaatttgtccaaaagaaattttcttattaccatttagtggnagattttttttttttctaactaattcaattgaaaattgaccataagcaaaattacacgctcttgtgtaatattttttcatttagtattaatgaactattttcggcttaagacccattgaacttaaagctgaacctttatcttcatcttcaacttttaaatcctctttattgcttggatatatatttttatttatcaggttttcnatttcttcacctgtaagtgtttcatatgttaagagagctttagctaatttatgtagatcgtcaattttttcagttaaaactgttcttgctctttcataacctttatctacaatttttctaatttctgagtctactttctttgaggtttcttcagacatattttgagttctcgcaacagaccttcctaaaaatacctcttcttcattcgaaccataggcaactggtcccaactctttactaaggcctgcttgcattaccatagctcttgctctttgagttgcttgttcaatatcactagatgcaccagttgtaactttatcttctccaaatatgatttcttctgctactcttccacccatagctatagctaattgagcatgaagctgttctcttgtttgagatagctgatctctctcaggtagttgcataaccattcctaaagcacgacctctcggaatgattgttgccttatgaattggatgagccgcatcctcattaa

SEQ ID NO: 1673 - DNA, 4000 bp, Escherichia coli
  misc_feature (405)..(405): n is a, c, g, or t
  misc_feature (2046)..(2046): n is a, c, g, or t
  misc_feature (3218)..(3218): n is a, c, g, or t
  misc_feature (3236)..(3236): n is a, c, g, or t
  misc_feature (3626)..(3626): n is a, c, g, or t
  misc_feature (3629)..(3629): n is a, c, g, or t
  misc_feature (3632)..(3632): n is a, c, g, or t
  misc_feature (3780)..(3780): n is a, c, g, or t
  misc_feature (3824)..(3824): n is a, c, g, or t
  misc_feature (3854)..(3854): n is a, c, g, or t
  misc_feature (3863)..(3863): n is a, c, g, or t
  misc_feature (3866)..(3866): n is a, c, g, or t
  misc_feature (3869)..(3869): n is a, c, g, or t
  misc_feature (3878)..(3878): n is a, c, g, or t
  misc_feature (3909)..(3912): n is a, c, g, or t
  misc_feature (3915)..(3923): n is a, c, g, or t
  misc_feature (3927)..(3930): n is a, c, g, or t
  misc_feature (3932)..(3933): n is a, c, g, or t
  misc_feature (3936)..(3936): n is a, c, g, or t
  misc_feature (3938)..(3941): n is a, c, g, or t
  misc_feature (3943)..(3943): n is a, c, g, or t
  misc_feature (3945)..(3948): n is a, c, g, or t
  misc_feature (3950)..(3950): n is a, c, g, or t
  misc_feature (3952)..(3954): n is a, c, g, or t
  misc_feature (3956)..(3958): n is a, c, g, or t
  misc_feature (3960)..(3960): n is a, c, g, or t
  misc_feature (3962)..(3964): n is a, c, g, or t
  misc_feature (3966)..(3968): n is a, c, g, or t
  misc_feature (3970)..(3975): n is a, c, g, or t
  misc_feature (3977)..(3982): n is a, c, g, or t
  misc_feature (3986)..(3988): n is a, c, g, or t
  misc_feature (3990)..(3990): n is a, c, g, or t
  misc_feature (3992)..(3993): n is a, c, g, or t
  misc_feature (3995)..(3995): n is a, c, g, or t
  misc_feature (3998)..(4000): n is a, c, g, or t
aagctggcaatcagcagaaattctgcagcgactcgatgataacgatgtacccagtgcgccgctgctaacgcgcatggagttgctcgaccatcagcagatcaaagcaaacgctacggtggaacggatgacctacgagggttttggtgaggttcgccaggcaatgccagcagcacgatttgatttaacgccggctagcatctccggtccagcgccacaactgggcgagcacagccgggaaatattattgaggcttggctatgaaaaagaagccttagacgagttgttggcgagcaaggcagtcattgccaatgacaacaatgaatagccgaaacagataacttaaatattcacaaaaaagagggagagttcagtatgaaaccagtttgtctgatcatgggagcaggngcaggtatcggcggcaccactggcaagcgttttgccgacgaaggctaccacgctgtgttgtgtcgaaggagtgacaaagaaggcctcgacaacatggtcgcagagattgaaagcgccgggggttctgctaccggctttatcctgaatgcgacggaagaaaacaccattgaggacacgattgccgaggtcgaaaagaatattggtccgatagaagttgttgtgttcaatctcggtgctcagattggtgatcggccgttggcggcgacaacctacaaaatgtttgagctgggttggcgaatggcgacttttgggctttttcgcgtcgcatcggttgtatgccctctgatggctgagcgaggcaagggggccattctggtgacatcggcaacctctgcaatgcgcggtaatcgagggcagcattcccatgctgctgcgatgggtggcagaagaatgttgtgtcagacactcaatgcagaatttggcccccagggcgtgcatgtagcgcacatcgtggttgatggagccgttgatgcgccagatacgcttggcaaaatgctcggcgaagagcggtttcagcagttacgcgagacccgaggtggagaccttgacgggttgttgttgcctgaagaaattgcggatacttattaccacttggcgcaccagcatcgttctgcttggtcctttgagcttgatcttagaaccttctcagacaccgcctggtggaatcactcataactgcgacggtttcgtctcaggtcttccgtaatattgagcgcaaggcctgcgacgatcaacatcatcgccagcaatttccaccagggcatcgcttcatccagccatagccaggaagtcgtcataccgaagacaggcacgagcagcgcccagggcgcgacgctcgcggcagggtatcggtttaacagaatattccaaatcccataaccaatcagcatgttgccaatgctttgccaaagtaccgtcgcccatgcaaaccatgaggcattagccatgctactgactacctctgacaaaccagtttggtaaattgccaaaaatgcgaggggaggaatcgagcacagcgacgaccatgcaaggaacgcaaatgcatccacttcgccgacgtgtttcaccacgatgttaccacttgcccagctcaacgcggcaatcaatacaatggtcacgccaagcgctgttgttacttcgttcgtatttaaaaaaaccacaagcagacccagaaaggcgatagtcatcgcaactagctgaagtcggctaacagattctttgaggttcaaaactgtcagcaggaccgtaaagaaaacttgtagctggattagcagggatgcaacgccgggcgtgatgtcttcttgcattgcccaaaacagtaatccgaattgtccaacgccgatgagtagtccgtagccgacgatatatttccaagctgtttttggtttgggtaagaaaaacactaaaggaaaagcgacaaacaaaaatcgaagtgcggcaagggtgaaaggtgccagttcatccagtgcgtagcgaagcaggacaaagttggtgccccaaataaaagtaaccagcagcgccgcagtttgatgaataagagacattaagttgcgtcgaaacttggcaagcaatgagaaaagngtgtttggattaacaagagaatgctgaagccgtaattttggttgagttgcatactaacgcttgcttggcttgcgagaaaccccaagcgagctggcgacatcagatgccggcgatgtgatcaatatctaacagcttggctggtttgcgcgccgcttggcatatttaggttagatgtggaaagatgtgtctcttaaatttggttgaaattcaggagttcacaggtgggattgcaaggtaaagcggcacttgtcggcgtcgctgactacaaaaacgtgcgtaaatacacgggtaagcggaagttctatcttgagcaatgggctgaactgacccagatggcgctagcagatgcaggcttgtcgaaagacgacatcgatggcatttgttgttcttcgattcctgaatctgacctttttgcaccagcaacggtggcggaatatctcggactaaaagtgaattttgcagaaatggtcgatctcggcggcgcctcctctgtcagtatgatttggcgtgcagcagcggccattgaattgggcatttgtgaggcggttgtctgtgctgcaccgggtattcctatcccctctaaccctgacagaggaccgcgcgatcccaatcgattttatggttctaccagcgccaattgggggtcaccccaaacagagttcgacgtgccctacggcaatgtggcccaaaatgtcggctacgcgctgatcgcccagcgatacgcggatgcctacggctatgatgagcgggcgctggcaaaaattgccgccgaccagcgcaccaacgcccaaggtaatccgaaagcggtttttcatggccagccaatcacaattgatgatgtgttgcagagcaagatggttgccgatccattgcatgtattagagatagtcatgccctgtgcgggcggcagcgcctgtattgtcgtaagcgagcgactggcacgtaaatgtaaacatcgccccgtgtatgtcacgggttgtggtgagcacttaacgacgcgttcggtaacttatgctgaagacatgacggtctcgccggtgggcccagccgctgccagtgcctttggcatggcgggcaaaaagcctactgatattgacgtgcttcaggcctatgactgttacaccattacggtgctgttaacgatggaagacgctggtttctgcgccaaaggngagggtttaagttttgtnaacgaacatagtttgacctttgatggcacctttccggtgaacacccatggcggccagctcggtgctgggcaggcagcaggcatggcgggtggtatgtcgcaaccggttgaaggcgttagacaaatcatgggtcgcgccgatggccgtcaggtaaaagattgcaataccgccttgatcaccggtaccggcggtattatgagtgaacaatcggtgatcatcttggagggcgcgtagatgaaaaatgaacgtgataatcatgcgccataccaaagacctcagccgcgcccgacgccgaccagcgagcctttttgggcaggtctagccgcgcagcaagtaaggttacaacagtgcgatgattgcgcgggttgggtttactacccgcgaagccantgnccncattgtttatcttcgaacctgacttggcaagacatctccggagaaggcacgctttacagctacacggtggcacagcagccgactgcccctcagtttgccggtgaggaaccccagttaattggtgtggttgagctgaaagaaggggtangactcaacacagtgatggtcaatgtttcgccggaagaccttaangttggcatgcgtgtgaaacctgtgtttttncaattagcnganacnacgctgctntactttgaaccaagttagcgcggacaaaaannnngcnnnnnnnnnccgnnnncnnccncnnnngncnnnngnannngnnncngnnncnnnannnnnngnnnnnncaannnanannangannn

SEQ ID NO: 1674 - DNA, 4000 bp, Escherichia coli
  misc_feature (246)..(246): n is a, c, g, or t
  misc_feature (353)..(353): n is a, c, g, or t
  misc_feature (477)..(477): n is a, c, g, or t
  misc_feature (540)..(540): n is a, c, g, or t
  misc_feature (626)..(627): n is a, c, g, or t
  misc_feature (630)..(630): n is a, c, g, or t
  misc_feature (674)..(675): n is a, c, g, or t
  misc_feature (1008)..(1008): n is a, c, g, or t
  misc_feature (1035)..(1035): n is a, c, g, or t
  misc_feature (1044)..(1044): n is a, c, g, or t
  misc_feature (1068)..(1068): n is a, c, g, or t
  misc_feature (1098)..(1098): n is a, c, g, or t
  misc_feature (1107)..(1107): n is a, c, g, or t
  misc_feature (1110)..(1110): n is a, c, g, or t
  misc_feature (1119)..(1119): n is a, c, g, or t
  misc_feature (1152)..(1152): n is a, c, g, or t
  misc_feature (1161)..(1161): n is a, c, g, or t
  misc_feature (1164)..(1164): n is a, c, g, or t
  misc_feature (1239)..(1239): n is a, c, g, or t
  misc_feature (1269)..(1269): n is a, c, g, or t
  misc_feature (1303)..(1303): n is a, c, g, or t
  misc_feature (1305)..(1305): n is a, c, g, or t
  misc_feature (1386)..(1386): n is a, c, g, or t
  misc_feature (1440)..(1440): n is a, c, g, or t
  misc_feature (1464)..(1464): n is a, c, g, or t
  misc_feature (1497)..(1497): n is a, c, g, or t
  misc_feature (1524)..(1524): n is a, c, g, or t
  misc_feature (1551)..(1551): n is a, c, g, or t
  misc_feature (1586)..(1586): n is a, c, g, or t
  misc_feature (1602)..(1602): n is a, c, g, or t
  misc_feature (1614)..(1614): n is a, c, g, or t
  misc_feature (1632)..(1632): n is a, c, g, or t
  misc_feature (1820)..(1821): n is a, c, g, or t
  misc_feature (1879)..(1879): n is a, c, g, or t
  misc_feature (1881)..(1881): n is a, c, g, or t
  misc_feature (1964)..(1964): n is a, c, g, or t
  misc_feature (1992)..(1993): n is a, c, g, or t
  misc_feature (2462)..(2462): n is a, c, g, or t
  misc_feature (2573)..(2573): n is a, c, g, or t
  misc_feature (2681)..(2681): n is a, c, g, or t
  misc_feature (2804)..(2804): n is a, c, g, or t
  misc_feature (2888)..(2888): n is a, c, g, or t
  misc_feature (3269)..(3269): n is a, c, g, or t
  misc_feature (3467)..(3467): n is a, c, g, or t
  misc_feature (3581)..(3581): n is a, c, g, or t
  misc_feature (3767)..(3767): n is a, c, g, or t
  misc_feature (3830)..(3830): n is a, c, g, or t
  misc_feature (3903)..(3903): n is a, c, g, or t
  misc_feature (3951)..(3951): n is a, c, g, or t
  misc_feature (3958)..(3958): n is a, c, g, or t
cgggtgagcttttccgcacgctcggtatagttgccgattatatccgcaacgttgaattcgtgtgcatatcctgcctctttatagaacgcatcgtccttttcaagctccgcagtaacagcggatattctgttcatatcaagcgtatgatagtcaagagaatatcttcttgcaatgtttaccgcattgaatctgcctgcgggcataaggtcgtttcttaccatatcgtaatcaacgaatatggcattnagatagctgtcgagcgtttctgcccagtagctgtcgttgtcggtcttctgctcatatacgccggtgattttcacatagtacggctcaacacctgccgcaagcgaaantatcttatatgtattgcccatatttatgccgagcgttttgagtgcgtcctctgaagcaagtccctcgtacacgccgtcaacagaggtctttgagggcagctcgcctctgacgagcttcatatgntcaaggctgtcggtcattcctataagcttcagccttgtagacagctccgaaccgttacgctcnccgtttacgatataaaggcaatcgtcaataagcgttgtcttgctgttctccgaggcgattcctatagcatttatccttgaatccgnnttngatacaacatcgtctatcgttgcctgctgggtattcgtatcggnngttatctgaagcgtctttgtaacggaatacagaccgggatatttgttgttgtcaatctggtactgctccatatcctttatcagcatacgctgtaaggatgcgtccatatatatcggaatagtgctcatcatacctgcggcaagcaggaagccgatgaaaagacacagcaccatccattttgtgttgcgcattttgcgccataataaagtaaacatcttgtattattccttccgaaagtaaagcctgttcagtttgccgtcttacttgacaacaacctcgtcaccctcggaaagtcccgatactatctggatctccgtagcattgcttatgccngtttcgacatccgtttccttcttgacnccgtccttntagacctgtacatagttcttgccngacagcgtctttacaagatacttcggtatnacgattgcnttntccgcctgntccttgatatagcttatatccgcaaccgttccnaccttgccnaanccgggcaggctgcccttgaactcggcatatatcgagcttgtatcctcgtcgccctgttcctttgcctcaacaggngtttttactatagtacccttgtactcctgntcgtcgatagttattgtaacttcctgaccttttntnaattttttatcatcgttgacggccgcctttacatatatcttatcgggatctattattgtagcgataaccttgtacgcctgnaccttcgagccggcgttcatacgctccgcaaagctgacaagtccgtcacacggngcatacagcttggaggtatcgtantcgttctgaagctgtgccagtgtattcttctcnatctcaagctgtaaacggtcattctcngcaccgcttgagccgtatgtattctgngcctgctgaaccttaagctcctgagtgcgtatctngtattcaagatctccngtgttgtattcngcgataaggtcgcccttntttaccgtatctcctgctctgacatatatcgttttaagagtaccgtcacgctctgtaaacgaacagtcctgctgcagctcggatacgcagtagccggtcgcactcgccttgtttattatagtcttctttaccgccttataggtagaatatgtaacatcctccaccttaagcacaggcggatcgagcannttttcttcctccgggaaaaaatagcatccggaagcagagcctgccatagcaagcactncngctattgcggcggcacgcaaaacagtctttttcatttttactttcctttcctttgaacaaagggattttcgcatctttttccntttatagaaaatcaaggattttgctgannttatatgtacaaaatttaaaaaacactatagagatgcttattttaattttagcatttttcacataaattttctacactttttcaaaattaaacgatatgcacaaataccaaaaaggttatttgtttattttgtacaccgtaaagcaactttaaataatcgaaaagcacttgaaaaagccgaacggatttagtataatagtgagtagtgtttatttttcaaattgacatataaaatcaatacgacgggcaggaaaagctcaagggaaggaacaaaataatggctacaaagtatgtattcgtcaccggcggcgttgtgtcgggactcggaaaaggtatcacggcggcttcactcggaagactgctcaagatgagaggttacaaggtaactatccagaagttcgacccctatataaacgttgaccccggtacgatgagtccttatcagcacggtgaagttttcgtaacagangacggtgccgaaaccgacctcgacctcggtcactatgaacgttttatagacgaaaacctttcaaagtacagcaatgtaacaacaggtaagatttactggacagttcttaanaaggaacgtcgtggagattatctcggcggcacggttcaggtaatcccccacataacaaacgaaatcaaatcaagaatatacagagttgcaaactcagccgaaaccacngcagatgttgttataaccgaaatcggcggtacggtcggagatattgaaagcactcccttccttgaggctatccgtcaggtagtttcggatgtaggcagagaaaacgttgtttatatccacgtnactctcctccccttcatcacaggcagcaacgagatgaagacaaagcccacacagcacagtgtaaaggagcttctctcactcggnattcagcccgacattctcgtttgcagaagcgagatggagattcctcaggatatgagagataagattgccagcttctgtaacgttcgcaagcaggacgttatccagaaccttaccgctccttctctttacgaagtacctcttatgcttgaaaaggaaggtcttgcaaaggtagtatgcgatcatctcggacttgatccccgtgttcccgatctcaaggaatgggaggatatggttcagcgtcagtacaacgccacaaagaataccgtaatcggtcttgtaggcaagtacgttgcactccccgacgcttatatttccgttatggaatccctgcgtcacgcaggctttgagaacgaatcgcacgttgaaataaagctcatcaantcagaagaggttactcccgaaacggcagacgagcttctgcatgattgcgacggcattctcgttcccggcggcttcggtgacagaggcatcgagggcaagattgaggctgtccgctacgcaagagagcataagaagccctatctcggtctttgtcttggtatgcacatggctacaatcgaatttgcacgtcatgtggcnggtcttacagacgcaaattcaagcgaattccacgaaggcgagcagaacgttatcgaccttatgcccgaccagaaggatgttgatatgggcggtacaatgcgtcttggcttatanccctgcaagctcgaagcaggtactatttcccgtgaggtttacggcgatgagcttatttatgaaagacaccgccaccgctatgagttcaacaacgtattccgcaagcagctgacagagagcggtcttgttatcgcaggtcagtcgcccgacggaaagctcgttgaaatagttgagcttccgagaagngttcacccctggttcgtggctgttcagttccaccccgaattcaagtcacgtcccaacagatcncaccccttattcaaggactttataagagcgtcgcttgaacaggcaaacaagtaaagaacgaacaataactgcncgtgaaagcgggcggttatattcatattacgggatattttacattccntttacancttcagaccgtatttaatccattaaaagaggtaatttatgac

SEQ ID NO: 1675 - DNA, 4000 bp, Escherichia coli
  misc_feature (184)..(184): n is a, c, g, or t
  misc_feature (252)..(252): n is a, c, g, or t
  misc_feature (357)..(357): n is a, c, g, or t
  misc_feature (702)..(702): n is a, c, g, or t
  misc_feature (714)..(714): n is a, c, g, or t
  misc_feature (716)..(716): n is a, c, g, or t
  misc_feature (879)..(879): n is a, c, g, or t
  misc_feature (990)..(990): n is a, c, g, or t
  misc_feature (1212)..(1212): n is a, c, g, or t
  misc_feature (1350)..(1350): n is a, c, g, or t
  misc_feature (2021)..(2021): n is a, c, g, or t
  misc_feature (2075)..(2075): n is a, c, g, or t
  misc_feature (2378)..(2378): n is a, c, g, or t
  misc_feature (2883)..(2883): n is a, c, g, or t
  misc_feature (3450)..(3450): n is a, c, g, or t
tccttgcacggtaatcgtacagttaaagcttcaaccagtattgatggggagtctcgtcatcacccatcagaagcgggtgtgaatactaaccaaaggcgcatatctctgcaagtgcaatttttactacccatactgtttgcagaaaaaaacgccatcccggtgattttacaggcagttcagcacnctgcagaccgcctgttacggttttaaacggccttgacctggtcggcgatgcgattcgccagttcggtnacctgcgcctcattttcgccttcgaccatgacacgaatcaatggctcagtacctgatttacgcagcagaacgcgtccgcgacccgccagcgctttttccacttcngccgtgacagcttttaccgcgtcactctgaagcggatcatgttcgcccgcaaagcgtacgttaaccaggacctgcggcagcatcttcatgccactacagagatcgtgcaggctcatgtggttacgcaccatcgcagtgagcacttgcaaacttgcaacgataccgtcaccggttgtggttttatccagcaggatcacatgaccggagttctctgcaccgagacgccagcccttctcctgcatcttctccagtacataacggtcaccgactttggcacgggtaaacggaatgccaagctgtttcagcgctaactccagccccatgttactcatcagcgtacccacnacgccgccgcgnanctgtccctgacgcagggcttcacgcgcaatgatgtagaggatctggtcgccatcaactttgtcacccagatggtcaatcatcatgatgcgatcgccgtcaccgtcgtaggccaggccgatatcggccttctccgccagcacgcgctgctgcagcagtttgagntcggtggcaccgcactctttgttgatgttcatgccgtctggctggacaccgatagcaatcaccgtcgcgcccagttcacgcaatacattcggcgcaatgtggtaggtggcnccattggcgcagtcgaccacaattttcaggccattcagattcagttcgctggggaacgtccctttgcagaactcaatgtaacgccctgctgcatcgacgatgcggctggcgcggcctaactgcgctgattcaacgcaggtaatcggcttttccatctccagctcaatcgcctcttcaacgtcgtcgggcagtttggtgccctcggacgagaagaatttaatnccgttgtcgtcaaacgggttatgtgacgctgaaatcacaatgcccgcctctgcgcggaaggtacgggtcagataggcgatggctggtgtcggcatcgggccggtaaaggcggccgtcaggcctgctgcggcgagaccngcttccagcgcggactccagcatatagccagagatacgggtatctttaccgatgatgatcttctttgaaccgtggcgcgccagcactttacctgcggcccagcccagcttcaggacgaaatcgggggtgatgggtgcttcaccgactttgccacgaatgccgtctgtaccgaaatatttacgattactcatgatactccttttgctcttcgggtcgcttcgaccacgcgcatcgcttcagccgtctcttttacatcatgggcgcgaataatctgcgcgccctgcatagcagcaatcaccgcgcaactcaggctgccggttaaacgctgtgacgggccgacgtttaacagctggccaatcatcgatttacgcgacatccccactaacagcggcaggccgaagtggtgaaaatcgccaagatgagccagcagttcataattgtggctgagatttttaccgaaaccgaagcccgggtcgagtatcagacgctcttttttaatgcccgctgcttcgcagcgcgctatctgctgagcgaagtaagtgtccacttcgcttaaaatattttcgtaaaccggtgcctgctgcatggtgcgcggttcgccctgcatatgcattaaacagacgggcagcccggtcgaggcggcggcttccagtgctccgggttcagaaagngaacgcacgtcgttaatgatgtgagcacccactcgcgcggcttcccggatgacntcagctttagaggtgtccactgaaatccagacttcgaaacgctgggcaatggcatcgatgaccggaatcacccgctccagctcctcctccacactcacttcatccgcgccaggacgggttgattccccacccacatcgatgatggttgcgcctgcattgaccatctcattggtatgcgtcagcgcatcgaccagcgcgttatgctttccaccatctgaaaaggagtccggcgtgacgttaagaatgcccatcacatgtggaaaagataaatcgagatgggaatcacgggcgaacaacttcatngcggaaactccttgctgatcaatatctggatgtaaaaaaccccggaccagccggggttttgtctgacgatgttgcgtcttatttgttgtactgctctgacatggtattgcctgggtttggcgtacgcggttcatcaaccggacgtggcgcctttggcgtaccgttgctgtctgagttgctgcctggatcttcccagcccgctggcggacgcacttcgcggcgcgccatcaggtcgtcgatctgcggtgcatcaatggtttcatacttcatcagcgcgtctttcatcgcgtgaaggatgtccatgttctcacccagaatctgacgagcacgctggtagttgctgtcgatcaggtgcttaacttcctggtcgatgatgcgggccgtttcatcagacatatgtttcgctttcgcgacagaacgtccgaggaacacttcaccctcttcttctgcatagagcaacggacccagtttttcagagaagccccactgcgtcaccatgttacgngccagattggtcgcaactttaatatcgttggacgcaccggtagaaacacgttctgcaccgtagatgatctcttctgccagacgaccgccgtaaagcgttgagatctggctttccagtttctgacggctggcgctgatcgcgtcgccttcaggcaggaagaaggtcacacccagtgcgcgaccgcgcgggataatcgttactttatgaaccggatcatgctctggcaccaggcgaccaataatggcgtggcctgcttcgtggtaggcagttgactctttctgcgattccgtcatcaccatggagcgacgttccgcacccatcatgattttgtctttcgctttctcgaactctaccatcgaaaccacacgcttgtttgaacgggccgcgaacagcgctgcttcgttaacaaggttggccagatcggcacccgagaagcctggcgtaccacgtgcaatgattgctgcatcaacatcagttgccagcggcacacgacgcatatgcactttcaggatctgctcacgaccgcgaacatctggcaggccaacaacaacctgacggtcaaagcgncctggacgcagcagcgcagggtccagtacgtcaggacggttagttgcggcgataacgataataccttcgttaccttcgaaaccatccatctcaaccagcatctggttcagcgtctgctcacgttcgtcatgtccaccgcctaaaccggcgccacgctgacgaccgactgcgtcgatctcatcgataaagatgatgcacggagccgcttttttggcctgttcgaacatgtcacgcacacgggatgcaccgacaccgacaaacatttccacaaagtcagaaccggagatggtaaagaaaggcaccttcgcttcaccggcaatcgcttttgccagcaaggttttaccggtacccggtggccccaccatcagaacgccttttggaatcttaccgcccagcttctggaaacggcttggctcacgcagatattccaccagctcagcaacttcatctttcgcttcgtcacaacctgctacgtcggcgaaagtggttttaatctggtcttccgtcaacatgcgggctttgctcttgccgaaggacatcgcgcccttac

SEQ ID NO: 1676 - DNA, 4000 bp, Escherichia coli
  misc_feature (1987)..(1987): n is a, c, g, or t
ctcgcgtctcctcgtcgccgacgccatccaccgccgactcgcctctcgcctcagttcaccgcgcgctcgcgagcgccgcgcctcgagcgagtgcggtcaccatgctcaccgcgcgctgcgtcatcgcgctccccgcgcgccgcgcgtcgcgcgctgcgtcccgtcgagcgcgcgcgccgtcgacgtcgacgtcagccatatctcccggtcgcgctctatccgcgtcctacgacgccgcggacgcgatcgacccgatgtcgagctacgatggcgcgtcctgcgtcgtcaccgactccatcgacgccgacgagatcgaccgcacgcgcgtgggggagacgctgagggaacaaatcgcaaacatgggaggggagcagctgatggacccgcgagacttcgtgtccacggacgcgcagcgacgacagtgcgcggtgttgttcgcgtcgtgcgcggcgttagtcgggaaggggatgtatgagttcggatgcgatggattcacggcgatggaggcgatgatggctgtcggaacgatcgggttggcgtactggacgagcgacctgggcacggggatatttcactggagcgtggataactacgggagtaaggcgacaccgttgctcggtggggtgattgatgcgtttcaagggcaccacaaatacccgtggacgatcacgaagcggcagtgggcgaataatgtgcacaccacgtgcgtggcgccgctcgtgttcaccacgccgacgctgttgctcaacgatcgggcgacggatttgatattcgtcggcgttttcacgtctttgatcgtacttagtcaacagttccacgcctggagtcacatgaaaaagagcgagttgccgccgctggtgctcaaggcgcaagatatggggcttttggtcggacgtcgcgaccatgggcagcaccacaagtcgccgtttgagggtcactattgcatagtcagtgggtactggaatccgattctggacggcagcgggttttttcgcgcgctcgaacaagccgtgttcaaggccacgggcacggctccgcgctgctggtcggatgacgtcgagttcatcgtgcaggaaagcgcccccgaaggctgggggcgaggcgtgctcaagtgagctcgtgagttgtatgaattaaattgcatttttctatcgcgtacagctgcccctattgggctgtttgcggttgtagtcgttgatacattttcgcttgtaaaaagcactctctgatgatacatgtcgtcctcggcgtcggcgaaatcacgctcgtcgcaacgccaacatctcgtcgacgacgtcgacgcaatcaatgtgacgattcaccaacgcgatgtcgcgcggcgagacaggcgcattattcgcaccgagcgagtgatccgtgtgcaaacgatcggcctcccactgccccacttcgacgctcgcgccgagtcgaagcagcgttcgagccgcggcggcttccccccactcgcacgcagaaaacaatgccgtctttccgttgtaatacctcgcatcgatatccgccccaccgcgcacgagtaattccaccgaagcgcaatctccgcgcttcgccacggcgtgcaacggcttccatccttgatgatggtttcgacagttggcgtccgcgccccctcgcaacaacaagcccacgcacgacgcccgcgcgtcgtcctcgacgccatccgcgcacgacgccgacaacaacacgtcgtccacgtccatatcgtgcgccatgagcacccgcacgcactcgcactccgccctcgccgccgccgcgcgtcccgctcgcccgagcgtctccgcccagtcgcccgcgctcgcccctccctcgcgcttctctagcattttctccagctcgcgatgccgtccgcggctcgcgcacaacgcgagcgcggcgccgacgtcggcgtgcgggaacgacacgaggacttccagggcgtcccagttctcgtgcagggctacctgttgcaagtcggcaaaccaacgcttcnaacgagggtcgttgcgccgcgcgaacgaggacgcgacgctcagcgcggtggcgggaacttgctgcgcgtgcgcggcgcgcgcgacggggtgagccatcgcgtcgcgcgccgctcgacgacgccgcgcagtgggggggacggcggtttcggcggagacttgcttactaaaagcgtcgagtcgagtattaggacgacttcgtcttggcttccgcggcgtcgcgctcggcctgggcctcttctaatccttcgcagtaattccacgtcacgccgacttctttcgccagagcggcgcgaatgaaggtggcgccgaggacgcccgggacgatgtacaacagcgccggttgggcggcgtcaaagacgttcatgacgacgatggtggtgacgatcccgacgagatagccgaacgcgacggcggggaaatacgttgtcacagtctttccgtcgtcgcggaccgttcgagaggcggtcgcagcttttttggacgccgatctcgtgagcgactttctcggctcgagcgccgccgcgcgtctcgcgttgtccatcctcaaaatcatcgccacgtaaagccctggaacgacgatatcccccagacctagcatgctaaacggtccatcagcgccctcgatcgcactggcggcgactcgcgggaaaagtagcttgatcggcgcgtcgaacgaccgcgccacgctcaccatcaccggcgtgcaaaacacccaaaacacgtcgtacacgaacaaccccgcgagcaagattgacccgatctgcacgctatcaatcgtcaaatactcgattccttgcagcgcaaacgacattcccagcgcattattcgccaaccaatgacgcgaacgaacgtacgccgccgttcccgccaacgccgcgacgcccgccgccgcctccgccagcgtgcactccgccgtccaccgctcgccgttcacccacttcatctccggcaccgaaaacagttcgtagctcacgagctcgcgtcccccgaacgcaaatttgtgcacgaccggggtcaggatcgcgctcatcgccacgacgccgagcatcccaaagtacgccgtcgcgcacacgtcgagcacgtttttgggcaaaaacttgaacgccagaaacgccccgaacagcacgcacgacccgagcagagggaacttttgcgcgtcttccttggtcatgacctctcccgagccctcgctcgccggtcgcacgcttcggtacgcgccggcgacgacgctcagcgtgctcacggcgacgatctgggcgttgggatcgacgaccgcgacggtcggcgcgagcgcgcagagcagcagggcgacgtgcgcgagcggcgcggcgatcgggtcggcgccgaccatcgtcggacgcgcgctcgagggcatggcgacgtcgcgcgggtgagtgacgagacgacgagcgcgcgcgaggggaagacgagacgacgctccgatacaaacttacgacgatgacgtcgtctacgagcgcacctccctcgcggtgcgcgcggtgactactctatcagcgcgtccgctcgccgcgggcgcgtcggcttgctgctgtaactgcgcctcggtcgccttggcgagcgcgtcgttcgcgtaccgtcgcgcgaaccgccgcgcggcggcgagcgccgcgcccccgtgcgtcccgacgcgctcgaacgtcgtcgccagcgcgtgatcgacgcgcgactcgttcgcgaccaagatcggcgctaagaacctatcgtacacgtacagcgcgccctgaaacctcggatgccagagatagacgctaaacgccacctgcgccgcgcgcgtcagtccttcgatattcgaatcctccgcgcgcgtccgcgcgtcgcgcgcgtcccgtcccgtcccggcggtcaccggcgcaccttacactcccaatacatcaccgctcgtcccccgaacgcgcgatccagcgccggctgcgccgccatccacgcgctcgcgacgacccagtacacgcaccacccgcgcgcgttgtccgcgcgcttgcggtcgtgctcga

SEQ ID NO: 1677 - DNA, 4000 bp, Escherichia coli
  misc_feature (5)..(5): n is a, c, g, or t
  misc_feature (71)..(71): n is a, c, g, or t
  misc_feature (125)..(125): n is a, c, g, or t
  misc_feature (355)..(355): n is a, c, g, or t
  misc_feature (812)..(812): n is a, c, g, or t
  misc_feature (959)..(959): n is a, c, g, or t
  misc_feature (1449)..(1449): n is a, c, g, or t
  misc_feature (1515)..(1515): n is a, c, g, or t
  misc_feature (1581)..(1581): n is a, c, g, or t
  misc_feature (1629)..(1629): n is a, c, g, or t
  misc_feature (1991)..(1991): n is a, c, g, or t
  misc_feature (2249)..(2249): n is a, c, g, or t
  misc_feature (2555)..(2555): n is a, c, g, or t
  misc_feature (2675)..(2675): n is a, c, g, or t
  misc_feature (2714)..(2714): n is a, c, g, or t
  misc_feature (2780)..(2780): n is a, c, g, or t
  misc_feature (2782)..(2782): n is a, c, g, or t
  misc_feature (2816)..(2816): n is a, c, g, or t
  misc_feature (2918)..(2918): n is a, c, g, or t
  misc_feature (2927)..(2927): n is a, c, g, or t
  misc_feature (2930)..(2930): n is a, c, g, or t
  misc_feature (2960)..(2960): n is a, c, g, or t
  misc_feature (2990)..(2990): n is a, c, g, or t
  misc_feature (3029)..(3029): n is a, c, g, or t
  misc_feature (3035)..(3035): n is a, c, g, or t
  misc_feature (3074)..(3074): n is a, c, g, or t
  misc_feature (3086)..(3086): n is a, c, g, or t
  misc_feature (3098)..(3098): n is a, c, g, or t
  misc_feature (3107)..(3107): n is a, c, g, or t
  misc_feature (3116)..(3116): n is a, c, g, or t
  misc_feature (3121)..(3122): n is a, c, g, or t
  misc_feature (3131)..(3131): n is a, c, g, or t
  misc_feature (3137)..(3137): n is a, c, g, or t
  misc_feature (3140)..(3140): n is a, c, g, or t
  misc_feature (3170)..(3170): n is a, c, g, or t
  misc_feature (3179)..(3179): n is a, c, g, or t
  misc_feature (3215)..(3215): n is a, c, g, or t
  misc_feature (3227)..(3227): n is a, c, g, or t
  misc_feature (3433)..(3433): n is a, c, g, or t
  misc_feature (3517)..(3517): n is a, c, g, or t
  misc_feature (3520)..(3520): n is a, c, g, or t
  misc_feature (3535)..(3535): n is a, c, g, or t
  misc_feature (3568)..(3568): n is a, c, g, or t
  misc_feature (3574)..(3574): n is a, c, g, or t
  misc_feature (3589)..(3589): n is a, c, g, or t
  misc_feature (3601)..(3601): n is a, c, g, or t
  misc_feature (3616)..(3616): n is a, c, g, or t
  misc_feature (3619)..(3619): n is a, c, g, or t
  misc_feature (3658)..(3658): n is a, c, g, or t
  misc_feature (3694)..(3694): n is a, c, g, or t
  misc_feature (3715)..(3715): n is a, c, g, or t
  misc_feature (3727)..(3727): n is a, c, g, or t
  misc_feature (3739)..(3739): n is a, c, g, or t
  misc_feature (3742)..(3742): n is a, c, g, or t
  misc_feature (3775)..(3775): n is a, c, g, or t
  misc_feature (3787)..(3787): n is a, c, g, or t
  misc_feature (3796)..(3796): n is a, c, g, or t
  misc_feature (3820)..(3820): n is a, c, g, or t
  misc_feature (3823)..(3823): n is a, c, g, or t
  misc_feature (3904)..(3904): n is a, c, g, or t
  misc_feature (3937)..(3937): n is a, c, g, or t
  misc_feature (3949)..(3949): n is a, c, g, or t
  misc_feature (3952)..(3952): n is a, c, g, or t
  misc_feature (3958)..(3958): n is a, c, g, or t
  misc_feature (3966)..(3966): n is a, c, g, or t
tagcngtgatgtattgtttatcttttacttcagattctttaacacgaggagttaaatattgaccagtagantttgtacgagggaatgcagttgcagttactgcaaaaccggaacctaacttcatntatttttggaagttagtcatattagtatcttcataatctttatcgtcttcttcgaacgctaatgcagatgcaccaggagtcaaaagataatcgttatgagaatacattttcaaaccgacagttacgaaagcttcattaaggtctttatccattacagaataaattggatattcagcattaacgtctgtgttaatacgcaatgtatggaaatatttaccagtgaaggaacngaaaggtttaggagattttttgtttttaattacatgtgtgcgaacttctgtgcggcatggaatcaaagaacgtttacggccgatgaaatatgtaccagggaagatagaacccatagccaaatcataagagtcgttacgaagagtaacgtcttggccttttttatttacgatagaaagagttacgacgttgttcaattggtgtttgttgatataacgaattacttcgctaatagtagtgtcggcattaaaacctgcacccatcaaacctaattgaatgtcgattttgatcatttcgttttcatcgttaaccattgcattgtaacgttcataagcagttgctttagaaactggtttatacaatgtgaaaacttcttgaccaggagtattatcgaaagtaaagtatacttgttttgctttattggaagggaaacgagattttacacgtaaacgaagagtntcgtcagaacgtaatttaaaatctttttgagcttcggaaccaccaatacggaaaccataaagagtacggcaaccagagttgtaagcatcggataatgctgcagtcaagtctacttcacgtttagttgtgcgatcataagtatcgccntaagtatatttagcatatgtcggatcataaataggtactggaacaccgttaggaccatcaaatgctgtaccgatacaaagaactgcgtcagttgtaccgaattgagaatcgtcataaagtttcttctttacagaattgacttcgacgaatacaccaggaagatctcgaaggatttcctctttaaaggtgaaagccatatttaaacctcttaagaaattatttaccaagatttagtaaacgttcgataagtttgctagttacaacatacattttatcgatgtttaaagtatagcgaacacttctaatagaatatttttcacgatacataacgtaggattcgtcagttaagcgttgatcgtaaagtaattcagatacaccacgcatttttaaataaccagtgtagtctaccataagctcttcaaattctttaagaactttattagcttggtcgtatgaagttgcgaagatgtcaaattggatgacgtatctnaatgcatgacgatacacatcgacaccttcttcttcaatattttctttaacgggatatttatcgtcnggacgataatcaggatttcctggagcacgacgaatagtcgtttccattaatcttggttttaaatcnttagcaggtacaccgctaataattttaaagaaaatataaggatgattnatttcctgatctcggtcgttaatcgtaacgccttcatcaggactcatctttacgttatcttcacgaaatgctttctctacgagttctacgagtaacgcaataaattcgtcgaaactaatggaactgtcagcccgtaatcggtcgagacgttttcgactattcagtatcctaccgggattagtgactgcaaccaattgttctttttgacgccgtacttggtcgagtacaaaacgttcattaatttcttgtgtcatagtctttgctccgcagtataagattctgttgtaaataatggatataatgtatatcgtaaaatgatgtccacaccatatccatgattactgatttgttcttcaatgctntcgatatgataatcgtaaagaacaaagccaacattatctttaagtaaattatctaaccgttcttttattttatttaaataaaacttacggtagttcttacctatatattcttcgaaatccatttctctgattaagtaattaatgatccgcattaccataacagatttattaggattttcgtcagataagttaactaaattttcaatagtagtaccagtccgatagttatttttgaaataacaaacattaggaagcatntctttataatctataataaagtcagtatcctcatcatcgaaatcggggtacttattgataggcgtggctgctaatttcgcagctacaactatattacagaagtgcacatatttcaggttgttgccgacaaaaattatattatctaagtatttgttcttattgttaatagcagtatactctgctaacttattattataatctttattaaatgcatcgatatcttcgtataatgaactatgattatcggtagcaaaaataaaacttctattctttacacaagaagaagataataaatttaaataatgntcggttaaattcttattatatcgatcagtatatttatcggagaatttaatctgagtcggacaaatataagcgaagtcgtaatcgataagttgttttgctatattttgaaaatcagatatngttctcatattcactaaatatatggatggcgctccatantttttagcgatcgtatatgcttgatataaatcagaatcttttccgtattcttcttcgacttgtganantaaatcgaatttctcgatcttacaagttttattngtatattcggagttgccgataattaataagctagtatgcttatcttccattatctaaacacctccgatcaatgctttaaagtttttcataaatgcttctggntttcgtttntantcgacaccattagcttcataataaacacantccatagtattagaataccagtccattacntatgtaacgtttataattttatccttgaagacaataatntctccngggaaaactggaaattcatttctaagataaatatcgtanccacgcattaanaataatttattntcggcactntctgtcganaatannggttgaagntgtgcncgngcttcccgtatcgttattttatgtccaagncctaaacanttttcacaaaatggatcaccgtgttttgaaaccggntccatacatgtncaattaatatgtttatttgcttgaattaaccatacaggaacttccattaattggattaaaccattaatgcgttcatcgaggtttttcattatgttttcctcaatgctttaagagaacgagataaattatctaacaagtctgtcgggaatgtatgtaacttacgtttttcagtataagaacgttttccgacacgaggttcagctctncccatagtaagatatgtaggatcgacaattaacttttggaaaatctccatctcggctttaatcattttaattaaatcagataanganggagctccacttccnctagaactagaagaactagatccaccagattcngtcganccaaaactaatattnccgatatgaccngaaatcttaccggangtngaagtcgttacagcatgtttactaacaagacttaacgtngctcttaatttacaaaattgttgtaaaagataaggnaagtcggctctattttcatanccaggaatttgntctaatagaaantgngcaaaccgacttgcttcttttaatgcgtataanacttctgtatcnctagcatcnaatacattgattagataattaacntcnccgagcgtataaaaattactaatttgttctgatgctaccgtatagactttatactttaatacttttttcccgtcgacagantctaattttttaattctaatttcgtataaagantcaggtttagtnccnccgacnggtttaanttctaaacgattaccaaatatcgtatactcaaaa

SEQ ID NO: 1678 - DNA, 4000 bp, Escherichia coli
  misc_feature (1989)..(1989): n is a, c, g, or t
  misc_feature (1992)..(1992): n is a, c, g, or t
  misc_feature (2817)..(2817): n is a, c, g, or t
  misc_feature (2834)..(2835): n is a, c, g, or t
  misc_feature (2838)..(2839): n is a, c, g, or t
  misc_feature (2845)..(2845): n is a, c, g, or t
  misc_feature (2847)..(2847): n is a, c, g, or t
  misc_feature (2850)..(2851): n is a, c, g, or t
  misc_feature (2855)..(2857): n is a, c, g, or t
  misc_feature (2861)..(2861): n is a, c, g, or t
  misc_feature (2867)..(2867): n is a, c, g, or t
  misc_feature (2869)..(2869): n is a, c, g, or t
  misc_feature (2881)..(2881): n is a, c, g, or t
  misc_feature (2902)..(2902): n is a, c, g, or t
  misc_feature (2904)..(2904): n is a, c, g, or t
  misc_feature (2909)..(2910): n is a, c, g, or t
  misc_feature (2923)..(2923): n is a, c, g, or t
  misc_feature (2928)..(2928): n is a, c, g, or t
  misc_feature (2939)..(2939): n is a, c, g, or t
  misc_feature (2943)..(2944): n is a, c, g, or t
  misc_feature (2947)..(2948): n is a, c, g, or t
  misc_feature (2950)..(2950): n is a, c, g, or t
  misc_feature (2952)..(2952): n is a, c, g, or t
  misc_feature (2955)..(2958): n is a, c, g, or t
  misc_feature (2960)..(2960): n is a, c, g, or t
  misc_feature (2964)..(2964): n is a, c, g, or t
  misc_feature (2974)..(2975): n is a, c, g, or t
  misc_feature (2977)..(2977): n is a, c, g, or t
  misc_feature (2999)..(2999): n is a, c, g, or t
  misc_feature (3003)..(3003): n is a, c, g, or t
  misc_feature (3005)..(3005): n is a, c, g, or t
  misc_feature (3018)..(3019): n is a, c, g, or t
  misc_feature (3034)..(3034): n is a, c, g, or t
  misc_feature (3042)..(3042): n is a, c, g, or t
  misc_feature (3044)..(3044): n is a, c, g, or t
  misc_feature (3049)..(3049): n is a, c, g, or t
  misc_feature (3051)..(3053): n is a, c, g, or t
  misc_feature (3055)..(3055): n is a, c, g, or t
  misc_feature (3058)..(3058): n is a, c, g, or t
  misc_feature (3060)..(3060): n is a, c, g, or t
  misc_feature (3063)..(3063): n is a, c, g, or t
  misc_feature (3065)..(3066): n is a, c, g, or t
  misc_feature (3070)..(3070): n is a, c, g, or t
  misc_feature (3078)..(3078): n is a, c, g, or t
  misc_feature (3084)..(3084): n is a, c, g, or t
  misc_feature (3087)..(3087): n is a, c, g, or t
  misc_feature (3089)..(3089): n is a, c, g, or t
  misc_feature (3100)..(3100): n is a, c, g, or t
  misc_feature (3105)..(3105): n is a, c, g, or t
  misc_feature (3110)..(3110): n is a, c, g, or t
  misc_feature (3120)..(3120): n is a, c, g, or t
  misc_feature (3122)..(3122): n is a, c, g, or t
  misc_feature (3133)..(3133): n is a, c, g, or t
  misc_feature (3135)..(3135): n is a, c, g, or t
  misc_feature (3138)..(3138): n is a, c, g, or t
  misc_feature (3141)..(3141): n is a, c, g, or t
  misc_feature (3148)..(3148): n is a, c, g, or t
  misc_feature (3152)..(3152): n is a, c, g, or t
  misc_feature (3156)..(3157): n is a, c, g, or t
  misc_feature (3162)..(3162): n is a, c, g, or t
  misc_feature (3167)..(3167): n is a, c, g, or t
  misc_feature (3173)..(3173): n is a, c, g, or t
  misc_feature (3176)..(3176): n is a, c, g, or t
  misc_feature (3183)..(3183): n is a, c, g, or t
  misc_feature (3191)..(3191): n is a, c, g, or t
  misc_feature (3214)..(3215): n is a, c, g, or t
  misc_feature (3217)..(3217): n is a, c, g, or t
  misc_feature (3219)..(3219): n is a, c, g, or t
  misc_feature (3227)..(3227): n is a, c, g, or t
  misc_feature (3230)..(3230): n is a, c, g, or t
  misc_feature (3232)..(3234): n is a, c, g, or t
  misc_feature (3237)..(3237): n is a, c, g, or t
  misc_feature (3240)..(3240): n is a, c, g, or t
  misc_feature (3243)..(3245): n is a, c, g, or t
  misc_feature (3251)..(3252): n is a, c, g, or t
  misc_feature (3255)..(3255): n is a, c, g, or t
  misc_feature (3263)..(3264): n is a, c, g, or t
  misc_feature (3283)..(3284): n is a, c, g, or t
  misc_feature (3291)..(3291): n is a, c, g, or t
  misc_feature (3296)..(3296): n is a, c, g, or t
  misc_feature (3298)..(3298): n is a, c, g, or t
  misc_feature (3300)..(3301): n is a, c, g, or t
  misc_feature (3303)..(3303): n is a, c, g, or t
  misc_feature (3306)..(3306): n is a, c, g, or t
  misc_feature (3310)..(3310): n is a, c, g, or t
  misc_feature (3313)..(3313): n is a, c, g, or t
  misc_feature (3317)..(3317): n is a, c, g, or t
  misc_feature (3320)..(3320): n is a, c, g, or t
  misc_feature (3323)..(3323): n is a, c, g, or t
  misc_feature (3327)..(3327): n is a, c, g, or t
  misc_feature (3329)..(3329): n is a, c, g, or t
  misc_feature (3331)..(3331): n is a, c, g, or t
  misc_feature (3334)..(3334): n is a, c, g, or t
  misc_feature (3336)..(3336): n is a, c, g, or t
  misc_feature (3338)..(3339): n is a, c, g, or t
  misc_feature (3365)..(3367): n is a, c, g, or t
  misc_feature (3369)..(3369): n is a, c, g, or t
  misc_feature (3377)..(3377): n is a, c, g, or t
  misc_feature (3383)..(3383): n is a, c, g, or t
  misc_feature (3387)..(3387): n is a, c, g, or t
  misc_feature (3395)..(3395): n is a, c, g, or t
  misc_feature (3399)..(3399): n is a, c, g, or t
  misc_feature (3404)..(3404): n is a, c, g, or t
  misc_feature (3409)..(3411): n is a, c, g, or t
  misc_feature (3419)..(3419): n is a, c, g, or t
  misc_feature (3426)..(3427): n is a, c, g, or t
  misc_feature (3429)..(3431): n is a, c, g, or t
  misc_feature (3444)..(3444): n is a, c, g, or t
  misc_feature (3446)..(3446): n is a, c, g, or t
  misc_feature (3449)..(3449): n is a, c, g, or t
  misc_feature (3454)..(3454): n is a, c, g, or t
  misc_feature (3459)..(3459): n is a, c, g, or t
  misc_feature (3463)..(3463): n is a, c, g, or t
  misc_feature (3467)..(3467): n is a, c, g, or t
  misc_feature (3470)..(3470): n is a, c, g, or t
  misc_feature (3480)..(3480): n is a, c, g, or t
  misc_feature (3484)..(3484): n is a, c, g, or t
  misc_feature (3488)..(3488): n is a, c, g, or t
  misc_feature (3499)..(3499): n is a, c, g, or t
  misc_feature (3502)..(3502): n is a, c, g, or t
  misc_feature (3509)..(3509): n is a, c, g, or t
  misc_feature (3515)..(3516): n is a, c, g, or t
  misc_feature (3519)..(3519): n is a, c, g, or t
  misc_feature (3526)..(3526): n is a, c, g, or t
  misc_feature (3528)..(3529): n is a, c, g, or t
  misc_feature (3541)..(3541): n is a, c, g, or t
  misc_feature (3544)..(3544): n is a, c, g, or t
  misc_feature (3551)..(3551): n is a, c, g, or t
  misc_feature (3555)..(3555): n is a, c, g, or t
  misc_feature (3560)..(3560): n is a, c, g, or t
  misc_feature (3570)..(3571): n is a, c, g, or t
  misc_feature (3573)..(3573): n is a, c, g, or t
  misc_feature (3575)..(3575): n is a, c, g, or t
  misc_feature (3580)..(3580): n is a, c, g, or t
  misc_feature (3584)..(3584): n is a, c, g, or t
  misc_feature (3588)..(3588): n is a, c, g, or t
  misc_feature (3590)..(3590): n is a, c, g, or t
  misc_feature (3593)..(3593): n is a, c, g, or t
  misc_feature (3596)..(3597): n is a, c, g, or t
  misc_feature (3603)..(3603): n is a, c, g, or t
  misc_feature (3608)..(3608): n is a, c, g, or t
  misc_feature (3610)..(3610): n is a, c, g, or t
  misc_feature (3614)..(3614): n is a, c, g, or t
  misc_feature (3619)..(3619): n is a, c, g, or t
  misc_feature (3622)..(3623): n is a, c, g, or t
  misc_feature (3631)..(3631): n is a, c, g, or t
  misc_feature (3633)..(3633): n is a, c, g, or t
  misc_feature (3645)..(3645): n is a, c, g, or t
  misc_feature (3647)..(3647): n is a, c, g, or t
  misc_feature (3649)..(3649): n is a, c, g, or t
  misc_feature (3652)..(3654): n is a, c, g, or t
  misc_feature (3663)..(3664): n is a, c, g, or t
  misc_feature (3667)..(3668): n is a, c, g, or t
  misc_feature (3670)..(3670): n is a, c, g, or t
  misc_feature (3673)..(3673): n is a, c, g, or t
  misc_feature (3677)..(3677): n is a, c, g, or t
  misc_feature (3679)..(3679): n is a, c, g, or t
  misc_feature (3683)..(3683): n is a, c, g, or t
  misc_feature (3687)..(3687): n is a, c, g, or t
  misc_feature (3703)..(3703): n is a, c, g, or t
  misc_feature (3709)..(3709): n is a, c, g, or t
  misc_feature (3713)..(3713): n is a, c, g, or t
  misc_feature (3720)..(3720): n is a, c, g, or t
  misc_feature (3731)..(3731): n is a, c, g, or t
  misc_feature (3737)..(3737): n is a, c, g, or t
  misc_feature (3749)..(3750): n is a, c, g, or t
  misc_feature (3756)..(3756): n is a, c, g, or t
  misc_feature (3759)..(3759): n is a, c, g, or t
  misc_feature (3761)..(3761): n is a, c, g, or t
  misc_feature (3767)..(3767): n is a, c, g, or t
  misc_feature (3769)..(3769): n is a, c, g, or t
  misc_feature (3777)..(3778): n is a, c, g, or t
  misc_feature (3786)..(3787): n is a, c, g, or t
  misc_feature (3790)..(3790): n is a, c, g, or t
  misc_feature (3798)..(3800): n is a, c, g, or t
  misc_feature (3802)..(3802): n is a, c, g, or t
  misc_feature (3806)..(3806): n is a, c, g, or t
  misc_feature (3808)..(3808): n is a, c, g, or t
  misc_feature (3813)..(3813): n is a, c, g, or t
  misc_feature (3816)..(3816): n is a, c, g, or t
  misc_feature (3821)..(3821): n is a, c, g, or t
  misc_feature (3828)..(3828): n is a, c, g, or t
  misc_feature (3835)..(3835): n is a, c, g, or t
  misc_feature (3837)..(3837): n is a, c, g, or t
  misc_feature (3839)..(3840): n is a, c, g, or t
  misc_feature (3846)..(3847): n is a, c, g, or t
  misc_feature (3852)..(3852): n is a, c, g, or t
  misc_feature (3854)..(3854): n is a, c, g, or t
  misc_feature (3864)..(3864): n is a, c, g, or t
  misc_feature (3866)..(3867): n is a, c, g, or t
  misc_feature (3872)..(3873): n is a, c, g, or t
  misc_feature (3875)..(3875): n is a, c, g, or t
  misc_feature (3878)..(3878): n is a, c, g, or t
  misc_feature (3890)..(3890): n is a, c, g, or t
  misc_feature (3893)..(3894): n is a, c, g, or t
  misc_feature (3900)..(3900): n is a, c, g, or t
  misc_feature (3902)..(3902): n is a, c, g, or t
  misc_feature (3904)..(3904): n is a, c, g, or t
  misc_feature (3907)..(3907): n is a, c, g, or t
  misc_feature (3910)..(3910): n is a, c, g, or t
  misc_feature (3913)..(3913): n is a, c, g, or t
  misc_feature (3919)..(3919): n is a, c, g, or t
  misc_feature (3921)..(3921): n is a, c, g, or t
  misc_feature (3928)..(3928): n is a, c, g, or t
  misc_feature (3941)..(3941): n is a, c, g, or t
  misc_feature (3944)..(3944): n is a, c, g, or t
  misc_feature (3946)..(3946): n is a, c, g, or t
  misc_feature (3948)..(3949): n is a, c, g, or t
  misc_feature (3952)..(3952): n is a, c, g, or t
  misc_feature (3956)..(3957): n is a, c, g, or t
  misc_feature (3961)..(3961): n is a, c, g, or t
  misc_feature (3969)..(3969): n is a, c, g, or t
  misc_feature (3979)..(3979): n is a, c, g, or t
  misc_feature (3981)..(3981): n is a, c, g, or t
  misc_feature (3983)..(3984): n is a, c, g, or t
  misc_feature (3987)..(3989): n is a, c, g, or t
  misc_feature (4000)..(4000): n is a, c, g, or t
taaattacgaattaaaatattagtaatataaattttttttattgataatttaattttattataaaaactttattctttcacttccctccaaacttatatttattatcaaatattaagttggtaaaatttgtcagttttggtcagtttacgtttttagttaaaatgttggccaatttttcttcagatttgtattaattaaattcaattttaattaggaatgaagatattgtagaattctaatttttgaattgattattttaagccaatatcatctactataatctatatctcctttgagaattgttatatatacttctttgtcttttgtatatttaatgattttgttatttgaatcttttttaattttaagcattcatttcgatgtaatgttattttctagtgtttatcaacaaatatcataactttatttttatataaattatctaattccttattgattgcttgtttctgattaatccaattctctctatatgcatcattataattagatgaaatatcggtattaattgagaagattgttgagtattctctatttttatctagtaatttagaaaataaatttttatagtattaatattgatataaagtaattaattttattatttatttttatattataattattaattattattataacacttttgacttattatcatttttttgtagtattatatataaatatgtatatatttatttttttaattttttatattcaaatttatttaaacctttctgttaattatattcgataaaattataattaaattttgtatattagtgaattgaaattaaaaatatctatttctctaatatatctttatgattagaaggtgttgaagtcattgaattattaattgctatattatcgtatacaactctatcttttgttgaatctaagttcttatatttattattttcaatgttattaactgaaatgttaaaaaaagcacttgtagttttttggtcatcatttacaaaacttctaagtaaaatttggtccatatacataaaagtataattgaaattaagaacggtttcacgaaatagttctatttctgaatctgaattaatattactgacgttattatatttatagccatataaaagaaaaataacaaaaataattacaaaaggaagaaaaattaagtttgctgtcatagaaaaaataatacgaaattcagatatctgcttaaatttatccataaaggaattcttttcatatagattattcccatttatttcgttaaaaagatgactttttaaaactaatataatactaatgtcgtataaaatactggtgatacttattactactacggtcgaccaccatactatattatatttaactatatcattttttgtattggagacgatatcgctattaacttgtttttttaagttgattggattattcatgaaataagtatacataccaaaaaattttattgaattatatataatgcaaaaaaaatagattattttaatttttttagaattgttggttactacttttgttctaattagtggataccaatcccctacaatttcacctgataaccaaaatatatgagcaatagcattacttatataccaatttttctgtgaaaaaggccaataggtatagggttcaaatgttcttaattgcatagtatttcttagtagatctcctgtagaacgtaaaaaccaatgaacaattaaaacaagattaattggcctataccaattttttccatttaatattaatattaaaaatatccatggaaaatgcatattaattaagtaggcatcaattacatattgtagtgcatcagatgtttgaaattttatatcaggatacatgttatgagaattactttcattaaaaaagaaagtaccatcgttaaagacaataccattaaaagttccttcagctaaatttataagcttttgcatttttttctttttcttttttttttttttttattnttntttttataaaaaaagtaaaaaaaaaatagagaaaaaattatattaaagatttaacaaaaatatcaaaatgaaaaacaaaagcaacaaaacaaaaagcaaaaataataataataataataaaatgaaaagcaaaaaaaagcataaaaaaaagtatcttttaattataattatatataatataatttatttaatatatattgatttatttatttactttttttctgataaaaaattataaatatttatatatgttattttttcattattattattttttttttttttacaattttctaaaagaaatgagaatattaataataataatttaaaacaagtatattaatccaaattgtattaatctatggaaaattttctagagcattaattataaatcataaatcatattatttctattgaaatttgtgattttctaaaaaaggtttattaaaaaatagatttattaaaacttaaattttatttattttatattaattatggaaaataggaaaatacttattaattaattaattaattaattacacatataatacatataataaattttattatatatattatttattatatttagtttattatgttagtattttcatttttaaagtaataaatctatatatataaaaattaaaaattaaataaatagtgaaatagttcatttaaatatagaattttaattggtttatttattatttaaaaaactattacaaatattattaaaaatgttaatttatggaaatataatttatttttatttttttttccatttttatttttcttttttattctattttaatttattttttntttttttttttttttcnnttnntttctntnatnnatannnatanaaatantnatattgtttttntaaatatatatattaatatantntattnntattaataataantatanttattaatatnatcnnatnntntntannnntnatcnataactatannanaataaaatattaaaataaaatnatananattttattattannatgttttagtttatnagtataantntaaantnnnanaananaantnnacantataaatnataatnaananaaataaaaacnaaaanaaaanaaaaaaatananataataatatnanatnaanatttatntatntatnnaattnctaantcttantantttaaanttaattanaaaaaaatatatatatatatatnntntnattttttnttntnnnaanaanaannnaaaatnnttnaaaaaaanntttttttttattattattnntttttanatttntntnntnttntatnttntatntanatntaantntntananannttataatttttttttatttttttatnnntnattatcantattanatanaaatattnaaanatttnaaatnnntatttttnttttaanntnnntttaattttaaananaanataanaaaanttanaatnatnttaaaaatanatanaaanaaatataaaanaanaaaatanttatanntantaatttntnntttaaaattaanacnaatatantatnattanatataagatnntncnatttnattntttntnttntanntttatntaaananaatnattanttnnaattatantnatttttaataantntnaannnttttaaaannatnntnaanttantnttanaaanatataattattttttntttatnattngatattnataatatatanatattnttttaaaatttnntttttnttnantaaaantnaaaaaaanntaattttnnttntttttatnnnantttntnaaaanaanattanaaaaatntatattnanannattaanntgtananaattgaatantnntttanntnttnataataatatanaannaaaaantncnatntanttntgttgngntttattnattaaatttattnaantntnnttnattnntttntttatttntttttattantnannttnnntatatttaaan

SEQ ID NO: 1679 - DNA, 4000 bp, Escherichia coli
  misc_feature (1986)..(1987): n is a, c, g, or t
  misc_feature (1991)..(1992): n is a, c, g, or t
  misc_feature (1995)..(1995): n is a, c, g, or t
  misc_feature (3307)..(3307): n is a, c, g, or t
tgaactttgatttttttaattttgggtaaacctacaatcatcattcctgctggaattaataccaatgaaagaaccatggctaccaaaacaccaaatgctgtgaaaacaccgaaatatttaattggatatacttgagatgtcaataatgaaataaatccaacagccgttgtaacagatgtcatggtcaccggcttccacatttcttgaatcatatttttaatggtatcaatttttgatgcagtaggattttcaactctaaataaatccacatgactgaataaatgaattccatctgcaacaccaatagcaatgagcatcactgggatcgttgtgaaaactgcataaattgggatgcccacaacagccaataatccaaatgtccaaatggtgctaaatgatacaaccagcatggttaaaattgtatttttcacacttcgaagtaataccaacaaaataacaataataactgtaagcacaatgggaaccattcgtttcatatctgctggacctaaaaccgccatagttccttccacaatgggccgaccagcaacatggattttttcttccccttcataggaatgggctaattcaagaatttcattatagaattcctgtgtaaatacatcatcattaatgcgagcaattatgacagtaactgtttcattgtctgaaacaagccgaccataaaccatttcattggaacgcactttttgttgaagctcatccaatttatcttgcgtttttgggatgcgtttatagaatgctttcacatccattccatcttccgttccaacaatattgtcagccgtatataatgacgttacatcttgcttttcaatctcatccatcttttgcaaatctttggtgagttgtttgatttttgtcaaagtgcctgtatcataaattccatttggattttccacagcaatgataattccatctttaatatcaaaccattcggccgcttgatcgctataaataaaggcaggatgatcttggggcatgtatttatctaaatccgtttccatccgtgtattatctttcatggcggacacgaagaagaccgtgataccaataaagataattatgaccaatgcgggtcgttttaatatgttttcaagtaagttaagcatggtttctcctttgattagttaatatttactaacattattgtgtaaaattttttagacttttagcaccttttctatagcatcaagcatttcatttacatcttttttcagatcaaaatcaaaattcataatatgccatttactcactaaaaatcgaaaactgccaatgaccattagtgatatttgctctgctttaatatctactcggacatcaccacttgcttgacctttttcaatcatagcaatcaatttattctgatttaatttcatcatgattcgaatgggttttgctagaatactattattattgaatatttcttctgaaaaaataatggctgttaaagatggattcttaataaatcgatttgtatgcccttgtatcatttttttaattttttcgatggtaggattattatcatctatttgggataattctttatttgttgactctttcatggttgatataatcgcaagaataatttcattcttactatcaaaatggcgataaatagccggttcagtaattccaatggcatttgaaatattctttatggtcaatccttgaatccctttttccgcaatcaattggattgattcctgaataatttggttttgtctctcggtgtaattgttcattcgtttatgtcaatgttatgtttgttagtattcactaacggatattataaatagacattttgatatgcaagctttttttctatttgtaatttttggaataaataagagtcattaaatcttctttagaataactatgtaggtcaatgaaacagcacaaactctcacctatcttaatcattatttctctgctattaattggactgtcatgctacagtccaannaatnncanaggaaaagatattgatgaaacattaacgaattggccccaaacaaattctaatttcattaatattaaattgcacatctttaatacggggatgaataaagtatcaccactattggttggaagccccgccccgtggcgacccgcacctgcttttttaattgagcatcctattcatggacttatttgatttaggcttacccgcagagattgctgaatcagcagaacgagtgcttcacccaattacacgaagattattttctacacgttcgttacctaataaaagtatttccaatcaactttcaaaagcaggattttcattagatagtgtaaaatatatttttctctcacatttacattttgaccatataggagatcttaatgaatttaaggatgccacaatagtgattggtgaagataccgatttagatcatttatcgaaattggatggatttgaccctgagcccattcatgatttgaacaaattaaatcttattcaaacactttcatttcacagaggaacccctttggcaaccttcgaaaaagctatcgattattttaaggatggaagtatccaaattattaaaggcggtggacatgttgatggaagcattgctttattaattcaattgcaagatggccccgttttactcagtggggatgaagtggttcactttgattggttaaatcatgatgatgttcaacgcatttctaaaaatccaaatcgaatcgcagacatacggaatcggattcgtatgttaattcaattagcgccagaagtagttctcattccaggacacgatttatcaaaacttcctttaaatcgaaatgatattatttaccataatctagactattttacacaagagttatggccgactaattaattgggctaataaatcaatttttcaaaaaagcgagtgatgattcagcaaattctctgaaactggtcggtgttgttctttcttttgaccttagatgttcaggaattaaaataccatcattataagctttatacatattaattaaatcatcggtataattttcagaagcaccgcggtattgaataatggcattttttgtatcttcataagaagattctatatatttcaattctggtcgatttaatacttctgccatgatggatgttgcttcaaggcaggtaatggattcataccctagtaattctttcacacccggttcttgttttttggttaatgcagaaacaacatttgctgcaatatcctttgtagccgtcatatttaaaggtaaatctgcttttattggcgatgaccaaaaattcatattttgaatggtnccggcgctaaataatacattttccataaaataatcaggtcgaaaaatgtgaagattaacatcggttagtgtcgccaatcgctgttcatgttcataatgtccagaaatatgactatcattatcaggaatatgggcaccaatactactcaaaatagcgactctatttattccggaatttctaattgcagttgtttgggcttgactcgtttgccgcataaactctcgaacattgggtgcagataaatctgggggaataagcgtaaatgctccatcgaccccagtaaatgcttcagttaatttttgtgaatcatctaaatgactcacaaagggttctgccccttttgatgtaatggattctaatgattctaaacttcgactgacggctcgaacctcgtgcccaagacctatgagtgattgcgtaatttgtgagccaatctgtcctgtggcgccaaggagagtgaatttcataataaggaattattcctttgtgaattcttttgctaagtcttccacggcttcattcatatccggcgcagtttctaacgattctcgatcctgttgaatgattcgcataatgcgtgctaaatattctgcatgccaaagctgtctttcttgcgcgtcttgttcagatggaagaaatgattcaatttcattgcgactcattatgcctttggattctaaaattcgctctaaa

SEQ ID NO: 1680 - DNA, 4000 bp, Escherichia coli
  misc_feature (92)..(92): n is a, c, g, or t
cggagcagggcgtcgcggatctgcgcggaaagtgcccgcgcgagcgtgcgctcgagatcatcaacaactgtgcacatccggactaccgtccncttctgctcgactactacaatcgtgcactcgaggccacgaagggcgcacagacaccgcatctcctggacgaggcgctttccttccaccagcgtttcgtaaagacggggacgatgcagaaataacatagacaaaaagggcataaaagccctttagggcccaaaaaggacccaacaagaactgttaaggtaaaggagaatactttcatgagcaatgaaaagatccaggcggggcttgacaagtacaacgccaccgtagagaaggcagcagcgaagttcccaatgcgtcaaagcattcctgagcagggcctttacaccccgctcgacatcaaggacacggactatgcagaggacatcggtttccccggtgtttatccctacacccgaggcgttcagccgacgatgtaccgcgggcgtttctggacgatgcgtatgtacgcaggtttctccacggcggaggagtccaacaagcgctatcgttacctcatcgagagcggcgcaacgggcctttcctgcgcatttgacctcccgacgcagatcggctatgactcgaccgaccccatctctgagggcgaggtcggcaaggtcggtgttgcgatcgactcccttgctgatatggagatcctctttgatcagatcgacctcggcaaggtttccacgtccatgacgatcaacgctccggcgtccgtcctcctcgcgatgtacatcgcggttgcggagaagcagggcgtctcggcggataagctcaagggcacgatccagaacgacattctgaaggagtatgcggcacgcggcacttacattttcccgccgcgcccgtccatgcgcctgatcacgaacatttttgaatattgctccaagaacgtcccgaactggaacacgatttccatctcgggctaccacatccgcgaggctggttccacagcatcgcaggaaattgcattcaccattgcagacggcatcgcttacgtcgaggctgccattaaggccggcctcaacgttgacgactttgcaggacgtctctccttcttctggaacgcacacaacaatgttctcgaggaagttgcgaagttccgcgcatcccgccgcatctgggccaaggtcatgaaggatcgtttcaaggccgagaaagcaaaatcccagatgctccgcgttcacacgcagacggcaggctcgatgctcaccgcacagcagccgaacaacaacatcgtccgcgttgcgctccagaccgcagcagcagtcatgggcggcacgcagtcgctgcacacgaactcccgcgatgaagcgcttgcgcttccgacggaggattcggttatggtcgcacttcgtacgcagcagatcgttgcgtatgagagcggtcttgccgatgtgattgacccgctcgcaggttcctactacgtcgaggcgatgaccaaccgcatcgaggcagaggcctgggagtacatcaagaagattgatgagctcggcggcgctgttgcggcgatcgagaagggctacatccagaaggagattcaggacagcgcctacaagtggcagatggatgttgagtccggcgcccgcgttatcgtcggcgtcaacaagttccaggtggaggaagaggctccgaagaacctcctccgcgtggatgcttccgtcggcgagaagcagaaggctaaggtcgaggcgatgaaggcaaagcgcgacaacgcagccgttcaggcggctctggctgacctcaaaaaggcatgcgcggacgagcacgaaaacctcatgccgcatatccttgcagcggtcaagacctatgctacgctcggcgaaatctgcggtgttatgcgtgaagtcttcggcgagtacgaggcacacgtcaacctgtaagaagcggttgtttggtgaatacacatggggcagcgccgcggtgcggcgccggctcccttcaggaggaatataaaaatggcagataaaatcagagtgctcgttgcaaaaccgggtctggatggtcatgatcgcggcgctaaggtcgttgcgcgcgcactgcgcgacgccggctttgaggtcgtttacacgggactccgtcagacccctgaggagatcgctgaggcggctctccaggaggacgtcaacgttgttgcaatgagcatcctctccggtgcgcatccgcacctcttcccgacggtcgtgaacctcgttcgcgagaagggaatgaaggatgtgctgatcatcggcggcggcgttatccccgagggcgatatccccgccctcaagaaggcaggtgttgccgaggtcttcacgccgggcacgccgaccagcgcgattgttgatttcatcaaggcaaacgttaaggcgtaacagcgccttttgaaaggatggatgacagacagaaaatgcttcagtctgtcatccattcccttgtttcttatggagtcactgcgctgaggaggtgggcatatggatattgcagcagaggtgctgaagggcaaccgcctcgcactctcacgcgccatcacggcgattgagaacgagcgcgagaatgctgtcgacatcatgaaagcgctctatccgcatacgggaaatgcctacgtacttggcattaccggccccccgggtgcgggcaaaagcaccatgacggataagattgccaaggaataccgcaaacgcgggaaaacggtcggcatcatcgccgtcgaccctacgagccccttttccggcggcgctattctaggcgaccgcatccgtatgaacgacctgacgctcgacgagggcgtttttatccgcagcatgggtacgcgcggcagcctcggcggcctctcgcacaagactgctgacgcggtaaaggtcatggatgctttcggcaaggacgttatctttgtcgagaccgttggtgtcgggcagtccgaggtggatatcgtacgggcggcggacactacgatggttgtgctgattccgggcatgggcgacgatattcaggccatcaaggcgggaatcttggagatcggcgatgtattcgccatcaacaagtccgatcttgacggtgcggataaactcgtccgtgagatcaatatgatgctggatctggatgaccatatgtccgactggcgtccgcccatccgtaaggtcgtcgcgaatcgcggcgaagggattgcggagctggttgacaccgttgaagaacaccgtgcccatattgagggcaatggggttctcacagagcggcgtacgcgccgcacacgcgatgagatgctggatatcctgcatgcaggtgtccggcgcagcatcgaaggccgcattatcaatacggggcgactcgacgactatgtggcaaagatcaaggcgcatgagaccgacccctatacggtggtcggcgagatcatggccgaaatgttggcatgaggaaatactgacggcggatgcccctccagaggaggatgaccgcatcagacattcctcgactcagctaggaggaagtatcatgttcaaggttctgggagtggatcacatcggcgttgccgttaaggatctcgaagagggaaagaatttctggtctgatgttatcggcattgcctgcacgaaccaggagacggttgctgagcagaaagtcacgacgaccttccatccgacgccgaacggcagcgagattgagctgctcatcggcacggcgccggacagccccatcacgaagtacattgagaagaacggcgagggcattcagcacgttgcgctgcgcgtcgacaacatcgagaacgcgatcgccgatctcatggcgaagggcgtccgcatgatcgatgagaagccgcgtatcggcgcgggcggcgcgaagatcgcatttcttcatccgaaatcgacgaagggcgttctcctcgaaatctgtgaacatgaggatcgctgaggagcggcgtttacccgaaacacattgcaaaggagcttcgcactctgcgatg

SEQ ID NO: 1681 - DNA, 4000 bp, Escherichia coli
  misc_feature (1935)..(1935): n is a, c, g, or t
  misc_feature (1992)..(1992): n is a, c, g, or t
agagcttgtgtatgaggtgtaaaaccttcaacagtactatgtaaccactttgaagctgtctgaacattatctgctccagcaaaaagctctgaaggcagaccataaattacctggaaatatccagaaacatacggttgatttgaacgccaatgtccaccaatgtccctggttagaaaatccggcttttctcgatctttaatggcattagtaaaccgagtcgagagtctactaatgatggttgttgcatctgccatgttatactccttaaaaataatttttggatcggcaagacctagttaaaggtcttgccggattcatttttgttagtggacaatgatgaacacattaattctttcaatggcgcggataggcgtcacatcgataataacatttaattctgacgcgacatcgtcgaaacttaccgcaacattaaaactcttaagaactgaatatctttcaacactcgattctaagaatttacttaagaaattagcaaccctaaactgggcttgaccaatccagtactgagttgcccttctctgtagaatgtcctttaacagagtaggaatgactttccgaatatatgcaataaattttgcaacatgtaaacgtttcagaactgacaatctcttccatgtagtaaactgagtaagaatgtatttgccctgaggttcaacaattatacaatttaattcagcatccatcaaatcgccacgttcagtatgatttgacttataagctaactcaatcggttctgcaatagcgcctttttcaataccggcaactggttctgcgatgaaatatgctccatcacaatatagatgcctctcaagtgcatgatacactggattcatccaaatacgttcaccagtaaaggcatcaaaaatcttccgatactgaacatacaaagctgacgtccaatcattccacggaacatcatttaatcgagctgtcaaatctgcagaatatgtagttaccttagcaccagtatcaccaagatgaatacaatcctgcctataagaagcaagataacgaccaccattctgaacggcagctgaataaccacctgtaataatgtaatctggttgataccaaggatacacacattcaggaatctgttcaatagaaccatcaacactaaccattgcaccttgataagctagtaatatctgtccgtcaagataatctctatctgcttcaagattattagtagaattatacattggaagtgttcgaccagtattaactgttccatctgttccattttcaaattgtacaccacctgcagcaatactaccagttgaagaatcaacagtacttccagaaacggtcatcagtaactgaacctgtaatctcctctttgtagcttgtgtctcagtggttgcaccaactgcaacaagaccatcgacagctgcagcagaaatacagccaacaaaattactattgttattaattgcatcttcaatatataatgaagtaccagatgtaagatctttaattgttgatccaaatgcattacgtcgagttaatgaaacagaccatggaccttccaatagagtagttgtaccatcatcatttagatagtacactccgatatccataaatagatatttatataaaaccactccattagtgtcagtatacatcttttcaagttcgacgttacgaactcccataattttaatattgttgtaatatgttccagcaccttttgcataaaaataccaaaccactgttgaagtaacttcaggcatttgggcctcagaggttacacttgcagtggaaccagcaatatatggtgaacaagaatatccatcaacagctccagaaattgttccagcgtaaacattatcaagtgttaatgttagcgtagcaagatttttagcgacaacctgtcctgcatcagctacagtatcaccgtctgcaaaaatccangttccaacagcaacagcattaaatgaagatgcgttagatgctacaacattcttactncccggagtaaatgtaaaagtagcatcagttggacccggtaaataagtaattttagtacttgaagtcgatgttgaaatatttttatttgcccaatatgcatcatctggcatcgctcgaacaagcaaaagattgctcgagtactgtaaaaatttatctgcaagataatgcgcttgagaagttcttcgataattgggctgtccaaataatttataaaattgttctcttgatgttaacgtgacaaccctattatgtggtccacggtcacaaagagtaacaatatatccaattcttccagtctctagagactcagcagcataagaagcatcctcaatgcttacatatacagctggttcacgacgatctgttaccggcataattcttaactcctttaaataaatttattttaataatctttcaatgccgatctatctgtctttatttaactcataaacaaaattaccacaatcccagattctatcataaccatttaattgcatattttcccattctgtcaatttttcatcaaatagttctaacttattttgcaataaatgtttctgaaattgtaaccttgacaatctttttcgtgtaccacattttacataataatatcctggttcagttgtccccacgaatttaaatccacatttataataaccagttcctatcccatatcttgcatctgcataagttatgatggaattaaatggtgttatggtatcaatagctctcaataatttagacaaagaacctggaacactagtattgtttttattacaaaatctataaatttcaatatcgtgagaggaactaaatcttggagagcctatagtcatcatcgatacgaattcattattataatacaaccctatatgctcaccattgataaatccttgaatgtgattagttgtatagaattgtttagcatcttctattggaactgaatagatttgacactttcttgcaaaaattctgtaatcattctttttaaatttattcaataacacacttttaactatattttgtttatataaccattcatcttcaaaaatttgaactaaattaatttgtttttgcaaagataataataatttgcgctgatgataatctttatcttttctaccaaatacttcagaatgccaataaacaccatttaactcgattcccaatttgatatctggaatgtagatatcgatctcatatggtggaattaaagttctatttctattttcaataatagaatattcttgacaaaactgcacaatctctttttcgacagaagatgtcccaactacaggatagcaggttggacatctaggcaaattaccattatcaatatcgtcatcaaaagtggtattacattttaaacatttccaaagatattttttattatgtttgacaccagaataatcagaaattgaaaacaatggtaaatatctttcttttaatctattactcgagagcaacttttcaaaaaaatgatatttttgtgtttgtgaaattttttgttgaatttctttgttcttcgctggattatcaactccatactttttcaaatgagtctggcgaataacatcttgaatcactggatcttgtagagaacaatcatatcctgttttattccgatacgtttctgctctttttttaataactacatgattgaaacttggattttcaaaacctgttttgctcatatatgtgttttttatcttctcttttacatcaggattttgaaatgggtgattgtaccccgttttttcaaaatattttttctgtcgaatcgtattgattccaggaatataattaatatgagaatatccaaagtgttcaaatgttgtttcaattttcttattctttatctctgggtcttgagaaggatttttgtaaccagttttctcaaaataagtagtaaaagcttttgtattaatatatttttgatcatcaattcggcaaccaatcgaacaatatgtttgataaccttttgaaaactgttttgtaaattcagttg

SEQ ID NO: 1682 - DNA, 4000 bp, Escherichia coli
  misc_feature (219)..(219): n is a, c, g, or t
  misc_feature (2814)..(2814): n is a, c, g, or t
  misc_feature (2830)..(2830): n is a, c, g, or t
  misc_feature (2910)..(2910): n is a, c, g, or t
  misc_feature (2933)..(2933): n is a, c, g, or t
  misc_feature (2975)..(2975): n is a, c, g, or t
  misc_feature (2989)..(2989): n is a, c, g, or t
  misc_feature (3117)..(3117): n is a, c, g, or t
  misc_feature (3120)..(3120): n is a, c, g, or t
  misc_feature (3137)..(3137): n is a, c, g, or t
  misc_feature (3468)..(3468): n is a, c, g, or t
  misc_feature (3828)..(3828): n is a, c, g, or t
  misc_feature (3863)..(3863): n is a, c, g, or t
  misc_feature (3867)..(3867): n is a, c, g, or t
  misc_feature (3902)..(3902): n is a, c, g, or t
  misc_feature (3942)..(3942): n is a, c, g, or t
  misc_feature (3998)..(3998): n is a, c, g, or t
catggcttgctaggccacgaccggtgtagcgaagttcatcacgtaccagttgttccaggttgtcaggcaggccaatgcgcgcgacctgctttttcgtttgctgtgcagcaagcggagcgatagcggcaattcggtggcaataatcttcaaaaaaccaggtgaattgtgcgtcggcaaccacctcgccaaccaagccgatttccagcgccctggttgctntaacaaattcaatctccagcagaaaacgcattgcctgctcgtgtcccaacgcctgtggcagcgtccaagtgagaccacaatcaggagaagtacccactctggcgtaacccgggtggaaggttgctttgtcgctagcaatacgcatgtcacaacacatcgcaagagacagtcctgcaccaatagcgagaccgttgaccccgcaaaccactggcttttcacaatcgatgcgtatgcctgtgacgagcctcaccacgcgctcgattgtgttagccgcactgtcactttgacggctattctttggtctgctcaaatccgcacctgcgcaaaaagtgtcgccgttacctgtgatgccgataacgcgcacggagtcatctttagtcgcctgttcaacagcttccactatgaggcttgtcaactctcccgacagggcgttttttttctcaggtcgattgaggcggaggattaacacatgatcttgttgctctttcaggagcgcaggttcgctcattggtttgcaccttgcattttcaaattcctattcgcttgttaagctcgacggtgttgtcgtgtagtattttttgttgcgttgtaagcgtgagatcttcaatctcgtcgagaatgtccagcggtctctcaagaccctccatgtgcggccagtcagaaccgacaatgaccctgtcctcacccatgtggtcaatcacttcacgaatgtcatcttcccagaacgggttgatccagacgtgctctttgaatgattcgattggatgtagccgatagtatgtcggtgttcgctcggcactatgctcaaatgccctcaacatttcagggaggaattcggaaccattttccactgaagcgatgcgtacattggggaatctctcaaatagtttgtcgaacaccaggcttgcgaggaaatccataatattgcgcggccgatgaaagtttgtaacgctgggttttgcacccatcgaaagcacatcctggtttttgacgtcatagccgttgctgtcatgacgcgtctgcccaatgtgcacaacgacagtgatacccgcttcgttgacccttgaccagaatgggtcgaataccttgtgtccaggattacgtggcccttctttagtaaagaccgcgctgggtcgcatgacgagtatacgggcgtctttcttcagagccttctcgagctcttcgcacgcatgattaacacttgcaagactgatataaggcgcagaaaacaaccgattctcatagttaaaaccccagtcttcatccagccattggttgaacgcactgtataaagtacatactgcatccacgtctttttttagcagttcctcgtagagaatggccagcgtcggaaacaaccatgcggcctcaagaccttgcgcatttagcctggcgatgcgggcatcccgatccatatattcaggcggcatgggttcgagtgaggagcgactcaactcggcactggttgcgttgttggggttgccgcgaaatagttctcgtagcacacctggttttgaaactgggttgaaggttgggttagtgaaccgatcgactttaccggcgatagagtggtactgcctgctgtcttccatcgtcacccattgtacgcaccgcggctgcatatgttttggcacatgacgagtaaaagcgtcccgaccttcgtaatagtggttgtctgcatcaaacagcaggccgttaaatctgggcactaatgcctccctatcaaagtcaaattcagcttaactatgattctaataataatagaaattccaaataaattgcaaaaaacctgcaaatatgcatattatttcacttaatagtatactaattaagagtttatatatcgagaggaagaccatgttaaatgagattaccgtccgtaaaatgccatttgagttcccctctgatatcgatgctgtattcgttgaaggcgaccacaaacgttcattcaattttattgcgggttcactgttactaccccacttagagccgtatcttattaggtcaatgaaagcagcagaaaaatatgtgacggatcctgttgttgcggaggggttggacaaatttgtgcgtcaggaggctcagcattaccagatgcacaaaaaattcaatgatactgttagactcgctggcttccccgaactggcatcttttgagaaagagctgtctgatgattaccaccggtttaccaataccaaatcattgaaattcaatctggcttatgccgagggtttcgaagcgctgacaatgaatgcggtcaaacacatgatggagccgaacggttttggtgaagatctaccaccatttatgcaaatggttgaatggcattttgtggaagaacttgagcaccgcacggtcaccttcgatgtctatgagcacgttttcggagattatctgtatcgtctatttgtaggtgtctgggcccagtggcactttagtaattggatgcgtcgcgtggccgcatacatgctggaagtaaggcctcagcaaaaaatagataaaacaatcgatcgagaagaaaaacttgccagagtccagccggccagcgttggcaatctactgccaggtttgttgcgcatctacctgccaaattanacgccgcacgatgttnaaatatcccctggcatccagcagcttgctgacaagtacacgaacatggcactggaaacctcttgaatgcaaagagccccnaacctgactcttttggcgacggncaaactagctaagaccgctcaaccaaggctaggtaaatctanaaattgaagccacntctgagccgcaaattcaacggctcatgaatttaaggcgtcagcagagcaatgctggcagcctattcttcgtctgttaatagaagatttaaacactggtgttaataacgatttacataaatttgcaaanganatcgtgggtaatcaggngtaatttggcttcctatttaataactatttttctcgccctctggcgcgtttctgcacctacgcaaaagaacaggtgagttacttagcatcaagcgccaataacaagcggcccgcttcctttattgataacagcgcctgctgccttttgtgagactcactggcgggctcaagcccccacaagttcatgtatttttgagcggctgcggcgacgtagatctgccacagcgcaagccgttcaacatctatggctctatatttggcataggctgcagaaaaacgggtcattgctggcgcaccaaagagataacgaagctctaccctcgcaatagcnacatccgatagcgggtcgcctactgctgcatcttcccaatcgagaacggcagcaattgcgccatgttgccaaagtatattctcaggccaaaagtctccatgcaacaaggtcacttctcctgaaaattgtttcacttttcgcgcactcagatattggctcagaccctcccattcctcccctttcggcagatagtcgagcagttcagggagcggctctgtacgcagactaacatccggtaacgttggcacatttgcctggtgaatcgatgccaaggtagctgccatcgcatcgatataatgagatttttcgccctcgggaattcttgtactgccgccaataaaagcaatgatcacgtaaggntagctaagcacggtgcagctcgtgtcaaaagccantggncgaggcacactgacgcccgatacatagagtgattntaaaatatcatgctccatctctgcgggatgtccagagtgntttttaccgtgctcgcgaatcacaacacttcgctcgttcccatctctatccatcanat

SEQ ID NO: 1683 - DNA, 4000 bp, Escherichia coli
  misc_feature (1)..(80): n is a, c, g, or t
  misc_feature (82)..(181): n is a, c, g, or t
  misc_feature (183)..(406): n is a, c, g, or t
  misc_feature (408)..(453): n is a, c, g, or t
  misc_feature (455)..(519): n is a, c, g, or t
  misc_feature (521)..(660): n is a, c, g, or t
  misc_feature (662)..(761): n is a, c, g, or t
  misc_feature (763)..(777): n is a, c, g, or t
  misc_feature (779)..(853): n is a, c, g, or t
  misc_feature (855)..(1073): n is a, c, g, or t
  misc_feature (1075)..(1344): n is a, c, g, or t
  misc_feature (1346)..(1426): n is a, c, g, or t
  misc_feature (1428)..(1435): n is a, c, g, or t
  misc_feature (1437)..(1484): n is a, c, g, or t
  misc_feature (1486)..(1491): n is a, c, g, or t
  misc_feature (1495)..(1495): n is a, c, g, or t
  misc_feature (1498)..(1499): n is a, c, g, or t
  misc_feature (1501)..(1505): n is a, c, g, or t
  misc_feature (1508)..(1508): n is a, c, g, or t
  misc_feature (1512)..(1514): n is a, c, g, or t
  misc_feature (1516)..(1517): n is a, c, g, or t
  misc_feature (1519)..(1519): n is a, c, g, or t
  misc_feature (1523)..(1525): n is a, c, g, or t
  misc_feature (1527)..(1528): n is a, c, g, or t
  misc_feature (1531)..(1531): n is a, c, g, or t
  misc_feature (1535)..(1535): n is a, c, g, or t
  misc_feature (1537)..(1545): n is a, c, g, or t
  misc_feature (1547)..(1548): n is a, c, g, or t
  misc_feature (1553)..(1554): n is a, c, g, or t
  misc_feature (1556)..(1559): n is a, c, g, or t
  misc_feature (1561)..(1563): n is a, c, g, or t
  misc_feature (1565)..(1569): n is a, c, g, or t
  misc_feature (1574)..(1574): n is a, c, g, or t
  misc_feature (1576)..(1589): n is a, c, g, or t
  misc_feature (1591)..(1597): n is a, c, g, or t
  misc_feature (1599)..(1599): n is a, c, g, or t
  misc_feature (1601)..(1607): n is a, c, g, or t
  misc_feature (1609)..(1617): n is a, c, g, or t
  misc_feature (1620)..(1621): n is a, c, g, or t
  misc_feature (1623)..(1629): n is a, c, g, or t
  misc_feature (1631)..(1643): n is a, c, g, or t
  misc_feature (1645)..(1645): n is a, c, g, or t
  misc_feature (1647)..(1651): n is a, c, g, or t
  misc_feature (1653)..(1653): n is a, c, g, or t
  misc_feature (1655)..(1662): n is a, c, g, or t
  misc_feature (1664)..(1665): n is a, c, g, or t
  misc_feature (1667)..(1667): n is a, c, g, or t
  misc_feature (1669)..(1673): n is a, c, g, or t
  misc_feature (1675)..(1675): n is a, c, g, or t
  misc_feature (1677)..(1687): n is a, c, g, or t
  misc_feature (1689)..(1689): n is a, c, g, or t
  misc_feature (1691)..(1695): n is a, c, g, or t
  misc_feature (1700)..(1708): n is a, c, g, or t
  misc_feature (1710)..(1710): n is a, c, g, or t
  misc_feature (1712)..(1716): n is a, c, g, or t
  misc_feature (1720)..(1720): n is a, c, g, or t
  misc_feature (1722)..(1729): n is a, c, g, or t
  misc_feature (1731)..(1731): n is a, c, g, or t
  misc_feature (1733)..(1733): n is a, c, g, or t
  misc_feature (1735)..(1735): n is a, c, g, or t
  misc_feature (1737)..(1741): n is a, c, g, or t
  misc_feature (1744)..(1747): n is a, c, g, or t
  misc_feature (1749)..(1752): n is a, c, g, or t
  misc_feature (1755)..(1761): n is a, c, g, or t
  misc_feature (1764)..(1769): n is a, c, g, or t
  misc_feature (1774)..(1774): n is a, c, g, or t
  misc_feature (1780)..(1781): n is a, c, g, or t
  misc_feature (1783)..(1783): n is a, c, g, or t
  misc_feature (1785)..(1785): n is a, c, g, or t
  misc_feature (1788)..(1788): n is a, c, g, or t
  misc_feature (1791)..(1791): n is a, c, g, or t
  misc_feature (1794)..(1798): n is a, c, g, or t
  misc_feature (1804)..(1805): n is a, c, g, or t
  misc_feature (1807)..(1807): n is a, c, g, or t
  misc_feature (1811)..(1811): n is a, c, g, or t
  misc_feature (1817)..(1817): n is a, c, g, or t
  misc_feature (1821)..(1821): n is a, c, g, or t
  misc_feature (1833)..(1833): n is a, c, g, or t
  misc_feature (1835)..(1835): n is a, c, g, or t
  misc_feature (1841)..(1841): n is a, c, g, or t
  misc_feature (1844)..(1844): n is a, c, g, or t
  misc_feature (1846)..(1846): n is a, c, g, or t
  misc_feature (1849)..(1849): n is a, c, g, or t
  misc_feature (1851)..(1852): n is a, c, g, or t
  misc_feature (1876)..(1876): n is a, c, g, or t
  misc_feature (1921)..(1921): n is a, c, g, or t
  misc_feature (1980)..(1980): n is a, c, g, or t
  misc_feature (1985)..(1985): n is a, c, g, or t
  misc_feature (1993)..(1993): n is a, c, g, or t
  misc_feature (2019)..(2019): n is a, c, g, or t
  misc_feature (2023)..(2023): n is a, c, g, or t
  misc_feature (2259)..(2259): n is a, c, g, or t
  misc_feature (2283)..(2283): n is a, c, g, or t
  misc_feature (3894)..(3894): n is a, c, g, or t
nnnnnnnnnnnnnnnnnnnnnnnnnnnnnnnnnnnnnnnnnnnnnnnnnnnnnnnnnnnnnnnnnnnnnnnnnnnnnnnntnnnnnnnnnnnnnnnnnnnnnnnnnnnnnnnnnnnnnnnnnnnnnnnnnnnnnnnnnnnnnnnnnnnnnnnnnnnnnnnnnnnnnnnnnnnnnnnnnnnnannnnnnnnnnnnnnnnnnnnnnnnnnnnnnnnnnnnnnnnnnnnnnnnnnnnnnnnnnnnnnnnnnnnnnnnnnnnnnnnnnnnnnnnnnnnnnnnnnnnnnnnnnnnnnnnnnnnnnnnnnnnnnnnnnnnnnnnnnnnnnnnnnnnnnnnnnnnnnnnnnnnnnnnnnnnnnnnnnnnnnnnnnnnnnnnnnnnnnnnnnnnnnnnnnnnnnnnnnnnnnnntnnnnnnnnnnnnnnnnnnnnnnnnnnnnnnnnnnnnnnnnnnnnnntnnnnnnnnnnnnnnnnnnnnnnnnnnnnnnnnnnnnnnnnnnnnnnnnnnnnnnnnnnnnnnnnntnnnnnnnnnnnnnnnnnnnnnnnnnnnnnnnnnnnnnnnnnnnnnnnnnnnnnnnnnnnnnnnnnnnnnnnnnnnnnnnnnnnnnnnnnnnnnnnnnnnnnnnnnnnnnnnnnnnnnnnnnnnnnnnnnnnnnnnnnnnnannnnnnnnnnnnnnnnnnnnnnnnnnnnnnnnnnnnnnnnnnnnnnnnnnnnnnnnnnnnnnnnnnnnnnnnnnnnnnnnnnnnnnnnnnnnnnnnnnnnannnnnnnnnnnnnnncnnnnnnnnnnnnnnnnnnnnnnnnnnnnnnnnnnnnnnnnnnnnnnnnnnnnnnnnnnnnnnnnnnnnnnnnnnncnnnnnnnnnnnnnnnnnnnnnnnnnnnnnnnnnnnnnnnnnnnnnnnnnnnnnnnnnnnnnnnnnnnnnnnnnnnnnnnnnnnnnnnnnnnnnnnnnnnnnnnnnnnnnnnnnnnnnnnnnnnnnnnnnnnnnnnnnnnnnnnnnnnnnnnnnnnnnnnnnnnnnnnnnnnnnnnnnnnnnnnnnnnnnnnnnnnnnnnnnnnnnnnnnnnnnnnnnnntnnnnnnnnnnnnnnnnnnnnnnnnnnnnnnnnnnnnnnnnnnnnnnnnnnnnnnnnnnnnnnnnnnnnnnnnnnnnnnnnnnnnnnnnnnnnnnnnnnnnnnnnnnnnnnnnnnnnnnnnnnnnnnnnnnnnnnnnnnnnnnnnnnnnnnnnnnnnnnnnnnnnnnnnnnnnnnnnnnnnnnnnnnnnnnnnnnnnnnnnnnnnnnnnnnnnnnnnnnnnnnnnnnnnnnnnnnnnnnnnnnnnnnnnnnnnnnnnnnnnnnnnnnnnnntnnnnnnnnnnnnnnnnnnnnnnnnnnnnnnnnnnnnnnnnnnnnnnnnnnnnnnnnnnnnnnnnnnnnnnnnnnnnnnnnntnnnnnnnnannnnnnnnnnnnnnnnnnnnnnnnnnnnnnnnnnnnnnnnnnnnnnnnannnnnncccnccnncnnnnnccncccnnncnnangggnnngnnggnaaangnnnnnnnnnannccccnncnnnncnnncnnnnnccccncnnnnnnnnnnnnnngnnnnnnnancnnnnnnngnnnnnnnnnccnncnnnnnnngnnnnnnnnnnnnncnannnnngntnnnnnnnngnncnannnnngntnnnnnnnnnnncnannnnnggttnnnnnnnnntncnnnnnttgntnnnnnnnngnancnannnnnggnnnnannnnaannnnnnnttnnnnnnccccncccccnntntnccnccnccnnnnngccccnnanaaancccccnttcngcagtgcatctnanagagangcncngcngnnggaaaaagcaaccagtactggtcngcatcgtgaccagtactggtaagtggtggtgaccagtactgcttnctgaagtgaccagtactgatccgatcggcgaccagtactggtcacttttgcccctcccnagagntgctctanctcagcccgccaggaaggagagcaanatgngcgaaagcaaaagtgcccgctgcgaccgaagtcacagcgggcactcgccgatagaatatcgaaggggggagagctactattctgcgctttcagcagcaggagcttcagccgtagccttcgtagagcggcgtgaacgacgcgtcttaggagcagccttcttgtcagccttttccttgagcatgttctcgttgaagtctacgagctcgatgaagcagacagcagcgttgtcaccgagncggttacccgtcttgaggatacgngtgtagccaccgggacggtcagcgatcttttcagcaacggggccgaagagttccttgacagcaaacttattctgcagctcagcgaagacgatacgacgtgcgtgcgtggagtcttccttagcgcgggtcagcaggggctcgacgtatacgcgaagagccttagccttagcgaccgtggtgaagatgcgcttgtgcaggatgagcgatgcagccatgttggaaagcatagcctcgcggtgcgccttcttacgaccgagatgattgaatttcttattatgtctcatctttctacttagtcattatctaaattgtacttgctaacatccatcccgaaggtgagtccgagtcgctccatcagctcgttgagctcgtccatagacttcttaccgaagttgcggaacttgctgagcgtatcagcgtcgaggacgacgaggtcggccagacggaatacgttgccggagcggaggcagttctgcgcacggacggagagatcgagatccttgagatcagtacggagcagctgagatacgcgatcgatctcctgcatgtccagtacctcctcgtcgccttcctcgatgactgcattctcttctacctcgacagggtcagagatgaagaggctgaagtgctcgatgaggatagctgctgcgtccttgagagcctgctggggatgaatgctcccgtcagtggtgatctcgagggtcagcttctcgtagtcagtcttctgctctacacgatagttctccgtgaagtacttgacattacggataggcgtatagatcgagtcgatagcgatcgtctgcagctcattctcctgagccgtgtcgaccagcttctcatcagcggggatgtaaccacgccccttgttgatggagagctcgatagtaagggtatacgcctcatcgatgtggcagatgaccagctcgggattgaggacttcgaaggaagtaagcttgccgttgagctcgccagcgaggaactgctgctgaccagagatcgtcaggctgacggtctcctcagtagcgtcctggacgagggcacggaagcggacttgcttcaggttgagaatgatgttagttacatcctccaagacacccggaatagtagcaaattcatgattgacaccttcgatcttgatggtcgagatggcgtagccttcgagtgaagaaaggagtatacgacgcagggcattaccgacagtggtaccatatcccggctcaagagggcggaactcgaacttagcgtacgagtccgtcgcatccatcatgaggacgttttcgggcttctgaaatgctaatattgccatgtgagtgagataatagggattattacttagagtatagttcgacgatcagctgctccttgatctcttcggggatgtcttcacgctgaggagcgctgaggaacttaccggagagagaagcctgattccactcgagccagctgtagctgctgtggctacgaccagccagagagtcggtgatgacctctaagctcttcgccttctcacggacgccgacgacctggccgggcttgagggtgtaagaagggatgttgactacctgaccatcgacggtgatgtgacggtgcgagacgagctgacgagcagcngcacgcgtcttagcgatgccgaggcgatagacgacgttgtcgaggcggctttccaggagctggaggagcacttcacccgtgacacccttcgtgcgctgagcctttt

SEQ ID NO: 1684 - DNA, 4000 bp, Escherichia coli
  misc_feature (1984)..(1984): n is a, c, g, or t
  misc_feature (1994)..(1994): n is a, c, g, or t
ttccttgtaggctctttaccgtattcattactgaattataggcacccaccaacgaattgatcttagtctttaacgcatcgttgtctttcgatacatcaaggttaattgtggcgccagctgaatccttttttaagttaatcgtcacacctgctataacatcggtgatggtattcgatgatttcgtcactgccaacccatcaacttcaagggaggcgtccttcggtattagcgattgcgataagcttgcgattccaccgttaacaagcccagtggcaccatcgtaggtgggattaaatgcgagttttgacaaaccggtcatgtcctggtcatcggggttctcctcaaatgtgccatcgttatcttcatcaacttttataacgatcttgtttgcgagacccgttttgttagaagccaggactaatctattccccgatccatcgttcactatagatgcggtaacatctgtcttggctgtattgatagcgtccttgatgcccgcaagagtattgttcgttgaatcgaccgttattgcaaaggcaatgccactgccgacctgaatctgcaacttctgtgtagcatacgtcgataaatcagctacggaatcggttgtgttggcaaaagttgtagagtagatgctttgggcaaacgctatgttaataactttgatggtgtggccagctgccgtagcacctgcattggtagttgtggtgaagactgctgtatcaccgctagtagccttcatgcttatgctgttactatcctttagcgccgtaacagcactcttgaaactcgagaccgatgataacagattgccgagaccgcttatttttgccgcgtaagcagcctctttcgtttgcaacactgtaagcggctggcgctcaacttgcataagcttgctgacaatatcatcggtgttaatgccggagaaaatccccgaagttgttaatgtcatgttacgcctctttatcgtaattactctttatactatcctgaaggcgctcgtaagcggttattaactccttaggcggaatctgctttaccacttggccttccttatcgagaaactggatgactacgtatttctcatcctggatagcaaaaacagccttgttgtcattaattgcagcccctggctctttttgcttagatactttgacctctggggtttgacccttttgttgggccggctcagagggttgtgcgcttttgattgcagctatattcagttttattagacccgtcggttttacttccatcttatttgaagagagggcggcctatgggccgcccccaattctccctccaattgattactgcctcagtagcgttaatacgttctgtggtaatgtattagcctgagctaataccgagataccagcctgctgcaagatctgcgcttttgttatattcgcagtctcagccgcgaagtcggcatccataatccgtgagtgagcggctgtaatgttctccaaaacgtttgacaggttagccgttgtggattggaacctgttaagaacagcaccaaggtctgctctcatgttcgagataacattaagggccgagtcgattctcttcatcgtgttgttagcgccagtaaccgtcttaacatcgatattgctaagagtctgggcatctttcgtaatcgtagtagcgccagcaccaaagccgagcttattggaagcgtcaccggtgatcttaatgtcgtcgcttgagctgagctcgatgaacccgtgtgtcgtagagtcagcgttaaatgcagcggtagcaccagcagtaacggttacatcaacgccgatatccctaccatcagcagcggtaagctcgatatacgtgccgttaagcgcagcaccaacgccggtctggcttgagtacatgttgatcctatcgatcaactgctgttgggtaagaccctctgttgcaaatgcagcggtagcggtatagttaaacaccgttacaccgttgatatcaagcttgtaagcatcanctgcggctgnaaagtcaatacctttgttggcaacgtttgaggttgtcgtgcccgtaacggcggtagctgttacgcctgaaacaccactcgcattgatagcgtttgctactgaccatgcgctagaggtggtctggccggcgccacctgcaacggtcgcgataattttattatcattgatctggatgttatcgccacctacgatagccacactggtagcagtagttgcagtactatcagcgatctgaccgatctgacctgcctttaagccctgtgcaagcgcaacgctaattgtctggccggcattggcgccaacctggaatgctttgcttcccagcgtaccatcaagcaatgtctggttgttaaactgggtctgcgttgcaatcctatcgacctcagcgacgagctgctgaacctctttgtcggtcgcaccacggtcaagagcggtgttggaagcgttcgctgactggacggctagctctctaatcctctggagagcattggtcatctcatcgatagcaccctcagcggtctgtacaagtgaaaccgcatcgtttgcattacgaacggcctgggtaagacccttcatctgcgagttcatcctcacagcgatagcaagaccagctgcatcgtcttttgctgagttgattctcatacctgaagagagtctctgcatagcagtctggagcggcatgagggtcttgctgaggtttctttgagcattcagggactgaatgttcgtgttgattactaatggcatttttcaattcctccttgagttttcgagtttccgatcttatgatcttcaacccatctgtcttaggcatccttgccttaggtttcttatcatggaaagcctaccttatccggccggtttaagggaaagccttccacaacaaaaatggccttacggtaggtatcgtcaggccattagcttttctgcacaggatttgagaaaattcttaagaattatgggtcttgttttgaaggtttctcgggaagtagttcacctatgttttgaagagccgcttctgaggttgatgcggcaagactgttctcttcgagaatagatttatagatctccgcgcgatgcaccgggatgtcttttggggctttgatcccgatctttacatgatcatctttgatctctactacgaagatttctatatctgttcctatatgtatactctcgttaagtttcctggtaagaaccagcattgcatctcctaatatttatgaaacaattaactaagatctgttgaacaaacggtgcttggtcgtatagtcctcgctagacaagataacctgttttgccgtgttatttctagtgttaatgataaccggcgccttaagattagcagtcatcttcttcggatctttcggaatagtcagtatcgacagcataacccagccttcgtcggagctgtcttcggctcctccggctacctcgagtttctccaggtcaatctcatttacggtcggcttgtaattctcaaaaaacagccatggatcggtcacgacaaatgcaacgtccggtgcgtccacggactgaagccaggcaaagggactatcctctttgtgaggaataaggatgaaccgctccgtttctggaaatccggggatttcatcgacgaaacgaattacgttcgcctcatcgatttcgacttgaccaaacctcgtagtcgtaaattgaatcctctttgtactcgttctttcagcaagttttaccataatgctccggaagcccccgcaggctatacctcgtgcctgtttgcttccttctctcctttgctcgtttaatagtaaccctaacaaagtgcttttaaaacactctagttattggtttaagaacctttacttacataacgctagatagcgctacctcaagaaatcaatgagcgatttttgcagcgccgtgctgccggccattaaagccgcctgatatacgttctcatccatcttgagccttgtgatgacttctgccaaatcggcatcttctacaccgctaagggcttttgt

SEQ ID NO: 1685 - DNA, 4000 bp, Escherichia coli
  misc_feature (1539)..(1539): n is a, c, g, or t
  misc_feature (1551)..(1551): n is a, c, g, or t
gagtacaccgcaaagttggtcgccagcgcgccatcgagcaaggtggccttgaagcccgcctcaaaagccttggagacttccttctcgtagctgtcgttgacgttgcggatgctgcggttcgtccccgtgcaacgcggcaagctcgccgggttctgcgcaacgccctggaaggtgagcgtcggcgccgtgccggtgcagaggcccgcataggtgctctcgatcgtggcgcgaacacccgtcgagttgaagccacctgagcggaagcccacgccgtaggacgtgaagaacgaaatgttctctgcggcatcccacttcagcgaaaacttcggctgcagttgcgagaacgtgcgcgaacggccaggaatggcggcgagcgcagcgttggtcgagtacgccgggttgatgaaggtggcggcacccgagaccacaccaaagaatccgggtgtctgcggagcaagcttcggaacgttgttgctgacatcgcgcttctcgcggtcgtaacgcagcgcgaccgacaattcgatgtcatcacgcacgtcgtacgcgagctgaccaaaagccgcgatcaccgagctgtcgaaatcgtcgtcatagagcaagtcggtcgggttaggtccgccggtacgcacgagcgcctgcgcgaggaagccttggccgttatccgaaccctgcgaaaccaccacacgacgcgcgatatcggcgaagtaggtgcctgcgacccagcgcaactgctggtcgcctggcgaggtcagacggagttcgaggctcgcgtcttgctgatcacgctgctgatactgataaccgtcgcacaagctcgggccgtacggcgggaagaaggtcgtcacgaagccgttggtcggcgcgtaaggaccgaagggcgccggcaacgggttgccggggcgcgcgtcgttgctcttttggcaggccggcgtgaggctgtagaggaagaacgccgcgctggtaccgtcggtgaggaagtagttggtctgatcgttgaaggccgcaacagcggtcagcgtgcccgaggccacttcccagtcacccttgaacgagagattgacgttctcttgctcgttctgcggcgtaacgttgttgacatatttaaatgcgtgcgtgttcggatcttctaggaagagcccgaggcccgggatgccgccgacttccttcagcgcgagcgacgcgttgaagttgatggcgcctgcatcgatcttcgagtacttcgccttgatgtcgaagttgcccgactcgcccatggggcccatgaggcgcgcgttaataccgctttcctcaaagaaatcgacgcaatcgtcgcagttgagcaggtcgttcttccactggccatcggtcttgcgcgtataagcggagaccgaacccttgtagtcgccaccgatggggccgccgacataggcgttcaacttgtagctaccgtagtcgccgtaacccgcgccgaggtcggcctcgaacatgtcgcccggcttgcgcgtggtgatgatcatggcaccggccacggcgttacggccgtagagtgcgccctgcggncccttgaggatntcgatctgcgagacgttcgcgagctcctgattgagtgcgttcgggttcgtttgcagcacgccatcgaccaccaacgcgaagttggtctcggcgtcgcggcccgtgttgatgccacgaatcgtgacctgcatgtcacccgcttcggccgtctgcacttgcgcgacacccggggtcaacgcgatgaagtcttgcggacgctcgatgcctgcggaagcgatctcggtcgcggtgaaagcttgcaccgtagccggcacgtcctgaatgcgctcggcgcgctgacgggcggtaaccacgatttcttcgagttgggcttcctgcgcacccgactgagcggcggcaacagcagcgatcacgctcgcgccaatcagcgagagcctgcgattacggtggaacattgatcctccggttcgatccgtgaatgggagtagtgggaaagccgccggagtctatgtcgcctcaggctaggcaatcaatgtaatttgcgtgctaccgcagatttatctgttgcaatttagcaacggtcgcggtttggaaaacggccggccgggtggacaaacgcacgtgccttgggcggcctcgggcatcatgagcatctgatttgagcagaggattcgaccgtgagcagcgccccacccgtacccgccatcgacatcgtcagcggcatttggaccgaggaagccctctcccaccgccccggctggcaagagcaattcttcgccgggaagatgaagtcgaagaccaacatgaaaggggtatcgctcgaagaccaactcgcgctgatggccgaggcgggtgtcgagcgggcgttcctgtttgcgcccaaagccggtcgccagggcctaccgggctcgttccatctgcccaacgacgtcgtcgctcgcgcgatcgagaagtacccgggccgtttttatggtcttgcaggactcgatccgtatgaaggcatgagcggcgtgcgcgcgctcgaagatgcggtcaaaaacatgggcttcatcggcgcgcatctttatccgcactggttcgatttgccgcccgatcacgccaagtactatccgttttacaccaagtgctgcgaactcggcgtgccgatccagatgcaggtgggtcagtcgatggtgtacgccaaagagcaacccatgcgcagcgtcggtcgcccgattctgctcgacggcatcgcctgcgattttcccgaactgaagttgatcggcattcatgtgggcattccgtggaccgacgaaatgatcgccatggcctggaagcacgagaacgtgttcatcggctccgacgctcacagcccaaagtattggccgccggcgttcgtgaactacatcaatagctacggtcaggacaaagtattgttcggcactgatttcccggtgctcggcttcaagcgcacgatggacgaagtgctcgggctgggcctgcgggcggatccgctgcgcaagtttctgcgcgacaacgcgctgcgcgtctacgggatcaaataattacggtgatttgcaaagccgtgagttgggtcagtcgctaccctgacccaccgactttacggcctgctcggccgtcatggcggcgccactcgccgtgagcgagtcgatggtggcgggatccaaccccgcctcacgcaagacttcgacggtgtgctcaccaagtcgcggtgccggtcgacggatcgaggccggcgtactgccaaagttcaccggaaaagaaggcagacgcaatttgccctcggtcggatgatcgaaggactgccagaaacccgtcgcttgaaggtgcggatcgttggcgagatcctcgagcgtgttcaccacaatgtgcgggatgccggagtgcgcgagcaccccgagccactcggccgtggtgcgtgtcgccatgatcattgcggtcgtttggttggtggcatcgatgttgcgcacccgatccgcaagcgtacgaaaacgctcatcgtcaatgaattgagggtatccggtgatctcgcagaacttcacccaatgggcatcgagataaggcagcaccgctatgtagccgtcttgcgtcttgtagggcttgcgatctttgctcatgagccgcgtgtagccgggcttgcccttgggcggatcgaaggtcatgccccacagatgctcggccatgacccaattgaccatggtctcgaacatgggcacctcgagctcctgcccctcgccggtgcgttcacgatgaaaaagcgcggcgagcacgccatacacgacggtgatggcggtggtcttgtcggcgacgatggtgggcaggtagcgcggctcacccagaaccatttcgttgagcatggcgatgccgctggccgcctggatggagtcatcgagagcgccgagcttgccgtagggccctttctttgagtaaccgtaggcgccgcaataaatgatgcgcggattgatcttgcgcagatcggcgtaatcgagaccaagcttggtcatcactt

SEQ ID NO: 1686 - DNA, 4000 bp, Escherichia coli
gttaataaatcagaatattcgtgatcatcgttaataccaacaaatacaccagtagaagaattttctaaagagtttggtggaataccagcattttctaaggcttcccaactagtttctaaaatccaacgatgtcttggatcaagagctaaggcttcatctggtaaacaattgaagaacttagcatcaaattgagatggcttagcaacactatttctagtatcgtataaacctaaacgaggaatattgtgttcagttggatctaattgatcacttggcttattaacgtaattacgatgtaaatctctagttttaattggaggtaaaacacaatccttacccttagctaaagctaaccaaagagattttgcactgttaatagcaccaggtaaacgaagacccataccaataatagcaatttttccattagactgtttttcatttaaggaagctggaatagattcacgaatttctgatacattcttttgatcaacattaccagataagaatttagcgagttcaaaagtattaccatagttgaaaagaatagctggtgagtaatgcttattcaattttcttgataatacattagttaatttaatagttgaaagagaatcaataccatagattgtgaatggactttctgggttgaaagattcgaattctggggtagatggaataatttccttgattgattgataaataagcttaatagcatcttgaatttcatcattaatttcttctctagtttttgtttctttattagattcttcctcttcatacgtaacattttcgttttcagtaacagtagatttattttgttctttttccatactaagaatcttgtcaatatccttaccactgtaactaacattaattgattcatcattttctttttcaactacttcttcatcaggaatttctgaaatttcaccactaataaccttagaaatatattttacgacgttagaatattgtaatcttgcaactcttcttgaaagagatcccttatcagtacttgggaattttttaccatagtctatgatgtatacattgtgaatagttaattgtttagcccaactagttaaactcttagagtcatccattaaaaccttaaaaatactattccaagtttgttcttgagcaattttacttaaagatttaatagtgcttctgtcaagagtggatggatcaatggaagtatcaaatggtttaccatcaacaataatttcttcccagtttggttcaacgaaacaaacaacttcagtttgagtggaatctaaaataagacaacaatgcttaatattagtacattcaaagttaatagtgttttcaaaaggtaatggattcatctttaaaccagtggcaaaggtaataatactatcaattctagtaacatatttataataaccagattttggtgaacgtttaagaacatcattagttttaaagtatggaacaccatcaatatcaacaaaaagatcttccttaccaacatcacaacgcatgcccgggactggtgaatcataaaattctcctggcttagctcttccaaagtaacctgtaacattagcagaagaatgggtataaagttcaccaatcgttggatcatcatcatttaatggtttaaagtagaaatcaacccatggaactctcatataatatccttcttcacctggtaatatttcaccctccataatatcatgtaaaacgtgaccaccttcagtggaacctaaaccattcataattaaaatatcaaatgtatctttataccatttagcaacaactggatttaatggagcaccaccagtcttaaaaactttatgttcatgatcttctctaaaataatcagcccaaatcttctttcttggatggttttcgtcaaataactttttatattcagcatactaattatacaataattaaataaataaaataaaataaataaataagtaaataaataaataaataaataaaaaaaaaaaacgtaaagataataatttttaataataaaaatatttaataatttaaaaaaaatgaatagttatattaaaaataaaaataacaaattttaataattaatttaatttaatatatataaattattttaaaataggtaattacttggaatgggaagtgacaaacactttgagctttagtttcagccatatcatctaaaatcatttcaggaacaaaaccaatatcacttaattgttgtgttttaaagattaaaccactagctccagtaacacagtaactaagtgcacaaattgcaccaaaggattgatggaatggaatacttttatttatttaatataaacaaaaaaaattttttttttttttgttttttattaataaaacttcattaccagtacatatatattaataattcctaaataataataacttactttacgaataaatcagtataaagtctattttgtggagtaaggaattgtttatatttatcaacacattgtttaaattgccatggaacgaatttcatttctaaaataggaaaatattttacaatgttaataaaacaaaataagcatttctattaatttatagttatataatctaaatctataataccttttttttttaagaaataaaaaagtattataaagataaagagataaatttctaaataattttaatgattataacaaaaaaaaaataaaaaataaaagaacaataacttactagtacattgaccattcttaataatagcttgtgatgaagaggaagtacccattacaagaagaacatcatcagggtcaccctttctttgatatgcttttccttcagcttttgcttgataaatttctttacataattcatcactataaatgaaacacattttgacaccttctttaccagcacataaaccttcatcttcttcagttaatggatgaatccatttccaaatccattgaccttgtttatttaatttttcatttttctcataatcatcataaagtctaaaattgacatcataaaatatcattttaatatcacaatgcttaacccagtattgtttaacatcattaccaagtcttggtggaaaagtaacaacaacacaacgtaaattccataatgcataaatcattaattgtgtaaatggtaatgtattagcaataataccaactcttgttcctggtgcaaaatcatatctttttttaagaacgtaagctgtagcttttacaagatcaaataattgataaaatggaatagttttccagttttctggataacgtgaactaatttcaggcttaaatgggaaaggtaataaattttccttagcaataatagctggttcattttttctcacaccattaaaacgaaggttcatcatatctatcatattatcaatgtcatatgaagcaatactaaaatatagaagagattattattcaatatttatatttaaaaaatattataatatattttaatgattattctttaaatgtactcttcaaataaattttacataataataaatagaataaaaacttttaaaaatagctaataaataaatatatatatatatatatattatattcatattaatattacgtttcttcatcttcatcacgtaataaatattttctttctaattcgacatttccaatgtaatcagttttatcaaagaaacccttcattttgaattttatatttgtaattaagaaaaaattttataattgaaaataatgtgaactatattttaattttgattttatatttactataaaaaattttttaaactcgatagttaatttctatattacttttatactttattattatatatacacaaattaatttaaataacagattgagaatttttatttaaattatatataaaaataaatattttaaaaattatataaaaaaatatttcattctattctaataaatacaaaataatataaagcaaaagtgataaaaaaagaaaaaaagaaaaaaaaaatactaaatacaactatttatattatttaat

SEQ ID NO: 1687 - DNA, 4000 bp, Escherichia coli
  misc_feature (2336)..(2337): n is a, c, g, or t
  misc_feature (2343)..(2343): n is a, c, g, or t
  misc_feature (2345)..(2347): n is a, c, g, or t
  misc_feature (2350)..(2350): n is a, c, g, or t
  misc_feature (2361)..(2361): n is a, c, g, or t
  misc_feature (2364)..(2364): n is a, c, g, or t
  misc_feature (2369)..(2371): n is a, c, g, or t
  misc_feature (2373)..(2375): n is a, c, g, or t
  misc_feature (2380)..(2381): n is a, c, g, or t
  misc_feature (2383)..(2383): n is a, c, g, or t
  misc_feature (2385)..(2386): n is a, c, g, or t
  misc_feature (2391)..(2391): n is a, c, g, or t
  misc_feature (2394)..(2395): n is a, c, g, or t
  misc_feature (2397)..(2398): n is a, c, g, or t
  misc_feature (2400)..(2404): n is a, c, g, or t
  misc_feature (2406)..(2418): n is a, c, g, or t
  misc_feature (2420)..(2427): n is a, c, g, or t
  misc_feature (2430)..(2435): n is a, c, g, or t
  misc_feature (2437)..(2438): n is a, c, g, or t
aaagtttgaatttttgtctctgctatcccaccacggttgtctcgatcaaacaaagcatgacaacttgcgcaattttttgaataaattgccgaacccaagctaacaagatttacatctaaatcaggcagcaacccattagccgaaaaatctgaccagcgtggagatttaagtgtttctaatttttcctccaaacccatcaagtgagttacgtttaccgaggagctgtatccaactggaagagtgctgttgttcgccacatcgacttggccgaatacacctaatacttggccaatattacgtcctaatgcgccagcccctgcgttcggaaccgagccattgtactgaaccacgtcaaaatacggtgcatcccacaaaaaaggataactcactggcgcattaggaggctgagcattgctaggcgtgtgcaacatttctgcggttacttggttcaaaatgacattcaaggcgtcaacgcgacccggacccggttttacatctgcttggtttcgctctaaccaatcttccatatgccgcatcgattgcctaagattttttcgaattccctctgggtcttttaccaaatatggactttctgcgatacgttttgcaaaacgattaaactttttgtcatcagcatatgtgtttatcaaagaccggttaagtgaatccataaacagccaaaaatcaaaatgcgatactccaccatcaattagagctgtcttatcaccaactttgatctcagtgacgtggcaagctgagcaattcataccaagatatgtttggttcggcatcctacctttgtcgacggtcaaacctattggtagattttctggatttgcttcggcatcatcccagtaaatcatgccaagaccttttaaaaatgaagattcaagaaacaatcgatctgtgtctggctgctccaatgatttagcaatgtcaaaaggaataatcggggagccttggggggaaaaataaaagaaggcgcggtcagcataatcccaaccttgatcgaccaataatgtattagattctgtgtaattttcagaaaaagccgagcctgagatcaaagcatacagaatgctcgaaacaccaattatttttttcattagacttctcctatgctgatgatgaaaccatcattatcacattatatacaaatatcccaatactgctttagcattaatcgttcaaatggttcgctttgcaaatcaaaatgtcaaccgatttagtgtcagtcttctggcatctcaagccactcatcgtcaggcttctcaagccactgaaggacaagtatggcaaaagtagtgattattcccagacggataaagtctttcagaatgaacccccactcgatagaataattaccgatagaaattgtatgattttgccagtcaccgatgttaaaaattatttcaattaaaggcatcaacgcatcgccaattactgtagaaataaattcacttgcggtgtgcccgaaggcgaatcccagtgccgcagctacaagaccaaatttgttcagcgtagttttcattctcgacattccataattactcccaaaccaaaccaatccattatcattttgcgcatgctagataaattatttcaagctgaggttaagcataaagcttgaaaaccaattcttacctactaaaaatatattaaaaacaatgacatattgcaatagccttatcctatttttcagtcgtcaaataaaatgggacggtgctgtcagacaaacgagcccaagcgtcagtattgggttgtcgctccttttctatgaaatcagcaacgaaggccactcaaatagcgcagcatcgcggttaagcttgaaagtattgcgtttcgagagggacctttgaaagttgagcagattgtaaaacgaggagtggattgagacgaacttctggagactgtgtattcgtctaaaccactgaattctgcaaaatatacccttaggtatatgtattatgagaggaaacaatctagagttgtttttcgaaaattggcgctattcatgaacggactacctatttgcatcagcataccccaccccgatcggtccctataccccctaagccaaatgagttcagtaaaaatttctaaaacaacaacatagcaatttggttgatttaagatttcggaagcggactctcggctaaatttaagaaaactaagcatgcgcataataaatgggtacgagagtgggtaccaccctaatcctcatataactcattgatttttttggtatgatggcggagcgacagggattcgaaccctggagacggtctcccgcctacacactttccaggcgtgcgccttcgaccactcggccaccnntccgtngnnnggngtttagacggnttntgggnnnannngcaannantnnttctnacnnanntnnnnntnnnnnnnnnnnnnannnnnnnntannnnnncnnttctgtttgccttttttctcgatcttgcccaaacggattgggccaatttcgccagtttttgccacatgcgttccgccacagggttgcaggtcaatttgatccgtatcattgccaattttaaccaagcgtattttgcccgacccacgcggtggttggacagacatggttttgaccagatcggggtttgcatccagctctgcgtcggaaatccagctctcggataccgataaattctgcgcaatcaggtcatttagggcgcgctcgatcgcgtctttgtctgtgggcgcttcgggcatgtcgaaatctagccgcgccttggcatgggtaatggatccgccggtcacaggacgcggaataacaacggataacaaatgtaacgccgtgtgatagcgcatatgcgcatagcgacgatcccaatcaatggtttgcatcacctcggccccgactggcaacagatccagatccgcgggatcaggataaatcacgatgtcttgctcgggtgctttgcgcacatctaaaaccgaaatggtttggccggcgacctcaagcgttcccagatcacaggcctgtccgcctgatgtggcataaaacagggattgatccagaataattccaccatctgccgtgtgggcaacaacgtggccttgggccattttttgataggcatcttgcaaaaataggggttcggtcattttttcaattcgtctatgtttttgatatagatgtcgcgctgcgcaaatgggatttcgatcccctcttggacaaagcgttctgcgatctggtgattgatttcggatttaaccacattcatataattgacgtcatgcaaaatggcgcgaatttcaaaatccagactatccgcaccaaagccctgaaacaccacagatggcggcgggttcagaacaatcattgactggttcgatgctatttcggccaagatctgttcaaccttgcgcgtatccgtgccataggccacgccgacgggaacaatcaaacggccgaccgtattgccacgggtccagttggtcaccaccccagataccaaatcggcattggggatgattacatccgtgcggtcaaaggtttcaattcgggtcgagcggacggaaatatcacgcacatagcccattttcccgccaacctcgatccaatcgccctgactgacggggcgttcaatcagcaaaatgatccccgacacaaagttagacacaatgttttgcaaaccaaaaccaatgccaacggacaatgcaccagcgacaatcgccagcgatgataaatccaaccccgtggacgaaatggcagccatggctgccaaaaacacacccacatagccaaaaccggaaacaatcgcattttgcgcgcctaaatcgagtttcgtttttggtaacaccgttccctttaacgcagattggatcaatcgcgtggcgccataaccgatggtaaagaccatgacaaaggtcatgaaatcaaggggcgaaatttgcgtgccgccgatggaaataccatctttgaactgggtccaaatttcggtcaaattcgccacacgcgcgccccagatcagc

SEQ ID NO: 1688 - DNA, 4000 bp, Escherichia coli
  misc_feature (1)..(1): n is a, c, g, or t
  misc_feature (3)..(3): n is a, c, g, or t
  misc_feature (5)..(5): n is a, c, g, or t
  misc_feature (8)..(12): n is a, c, g, or t
  misc_feature (16)..(18): n is a, c, g, or t
  misc_feature (20)..(21): n is a, c, g, or t
  misc_feature (23)..(27): n is a, c, g, or t
  misc_feature (31)..(31): n is a, c, g, or t
  misc_feature (38)..(38): n is a, c, g, or t
  misc_feature (41)..(43): n is a, c, g, or t
  misc_feature (46)..(46): n is a, c, g, or t
  misc_feature (51)..(51): n is a, c, g, or t
  misc_feature (54)..(61): n is a, c, g, or t
  misc_feature (66)..(67): n is a, c, g, or t
  misc_feature (69)..(70): n is a, c, g, or t
  misc_feature (72)..(72): n is a, c, g, or t
  misc_feature (74)..(75): n is a, c, g, or t
  misc_feature (78)..(81): n is a, c, g, or t
  misc_feature (83)..(83): n is a, c, g, or t
  misc_feature (85)..(86): n is a, c, g, or t
  misc_feature (88)..(88): n is a, c, g, or t
  misc_feature (90)..(90): n is a, c, g, or t
  misc_feature (94)..(94): n is a, c, g, or t
  misc_feature (96)..(97): n is a, c, g, or t
  misc_feature (102)..(103): n is a, c, g, or t
  misc_feature (105)..(105): n is a, c, g, or t
  misc_feature (114)..(114): n is a, c, g, or t
  misc_feature (117)..(118): n is a, c, g, or t
  misc_feature (121)..(121): n is a, c, g, or t
  misc_feature (123)..(124): n is a, c, g, or t
  misc_feature (128)..(128): n is a, c, g, or t
  misc_feature (131)..(131): n is a, c, g, or t
  misc_feature (133)..(134): n is a, c, g, or t
  misc_feature (138)..(139): n is a, c, g, or t
  misc_feature (141)..(141): n is a, c, g, or t
  misc_feature (173)..(173): n is a, c, g, or t
  misc_feature (235)..(236): n is a, c, g, or t
  misc_feature (242)..(242): n is a, c, g, or t
  misc_feature (266)..(266): n is a, c, g, or t
  misc_feature (269)..(269): n is a, c, g, or t
  misc_feature (1869)..(1869): n is a, c, g, or t
  misc_feature (2196)..(2196): n is a, c, g, or t
  misc_feature (2669)..(2669): n is a, c, g, or t
  misc_feature (2992)..(2992): n is a, c, g, or t
  misc_feature (3803)..(3803): n is a, c, g, or t
  misc_feature (3805)..(3806): n is a, c, g, or t
  misc_feature (3808)..(3808): n is a, c, g, or t
  misc_feature (3810)..(3811): n is a, c, g, or t
  misc_feature (3814)..(3814): n is a, c, g, or t
  misc_feature (3816)..(3817): n is a, c, g, or t
  misc_feature (3819)..(3820): n is a, c, g, or t
  misc_feature (3822)..(3822): n is a, c, g, or t
  misc_feature (3825)..(3829): n is a, c, g, or t
  misc_feature (3831)..(3832): n is a, c, g, or t
  misc_feature (3834)..(3839): n is a, c, g, or t
  misc_feature (3841)..(3852): n is a, c, g, or t
  misc_feature (3854)..(3857): n is a, c, g, or t
  misc_feature (3860)..(3861): n is a, c, g, or t
  misc_feature (3863)..(3866): n is a, c, g, or t
  misc_feature (3869)..(3869): n is a, c, g, or t
  misc_feature (3871)..(3877): n is a, c, g, or t
  misc_feature (3880)..(3887): n is a, c, g, or t
  misc_feature (3890)..(3893): n is a, c, g, or t
  misc_feature (3898)..(3901): n is a, c, g, or t
  misc_feature (3903)..(3903): n is a, c, g, or t
  misc_feature (3905)..(3908): n is a, c, g, or t
  misc_feature (3911)..(3914): n is a, c, g, or t
  misc_feature (3916)..(3917): n is a, c, g, or t
  misc_feature (3920)..(3921): n is a, c, g, or t
  misc_feature (3923)..(3930): n is a, c, g, or t
  misc_feature (3932)..(3938): n is a, c, g, or t
  misc_feature (3941)..(3941): n is a, c, g, or t
  misc_feature (3943)..(3955): n is a, c, g, or t
  misc_feature (3958)..(3962): n is a, c, g, or t
  misc_feature (3964)..(3964): n is a, c, g, or t
  misc_feature (3967)..(3968): n is a, c, g, or t
  misc_feature (3970)..(3970): n is a, c, g, or t
  misc_feature (3972)..(3974): n is a, c, g, or t
  misc_feature (3976)..(3977): n is a, c, g, or t
  misc_feature (3979)..(3986): n is a, c, g, or t
  misc_feature (3989)..(3990): n is a, c, g, or t
  misc_feature (3992)..(3994): n is a, c, g, or t
  misc_feature (3996)..(4000): n is a, c, g, or t
ncngnggnnnnnttannnannannnnnaagnagggggnggnnncanaaaanggnnnnnnnntttanntnnancnnccnnnnancnnanangggntnnaaatnngntttttaaanttnnaananntaantcnanngggnnanttatggcaaatactaacttaactaatcaaagncaggttttcgttgaggagtatgtacgctccggagatcacttggaagcagcaaagaaggctgnntacaangacactcatacattgcgtaatcangcntgtaagctccgcagagagtgattcagtataaatacctcaaatcaattttgtattacttaattttaggtatgcactattaatatccgtaccagatttaaaattagacaaatttggaaaaagagtttccatatcattatcaggaactccaaaccaactgcacaatgtagcattcatttgttccacagataatttaggcacaaaacgacctttccctccatttttgacgtcatcatctccccccatagtaaaattcggtaaatccccataaaactttccaccattgaaagtcgttccactgcttttactcatgaccaaattaatggtactccatgcgtgatccgtcccatctccattattcccaatggttcttccaaaatctgatgacgtaaaggtcgccactttgtcatccacacccatttcttctagtgctttttgaaatttccacagtgcaagacttaattctcgaagaagaacaggatgttcctcgggctgatttccatgagtatcgaaacttccaaaattgacgaaaaatatttgacgattgaaattcattttggaactggatgatcccaggtggatcaattgtgcaacagcttctaacttttctatcaggtcaccattcaattcctcctccatacctgttttagcttttgttggaattgaaaatagactttccccgtaagaagcagttgaactgaaagtttttttatgatttgaattccaataggtttgtaataaatcatctaaatcgagagatcccttgagcatctggttgtatacttttctaaatgggtcgcttcccggattatttctataaagtgttgaaaaaagatctcgacggctggaatagacagcattgtcggaatcttttttcatgtcccaataagtagtggtttgatccggactgaacagtataggcttactattaactccggtcatcagacggacttgaccattgaaagaaacattaagccccatcacactatcattgttgatcccagaccagagatcggccaatcttccagcccatcctgtcatgttaagatcgtctgctttgccagtataaatgatgcgtctttggtggttgtgtgcaaacaaaaaagatggttttttcttagcggcattctgaaaatcagtcttcccactgagtggctcaacaagagttccaatattaccaaccaaagaagctttcccatcttctagcaacctcgccaattcaggcatcattgcattaaccttcacttccgaaatcgatgtcaggggataagaacctcccaggtaggcagccgaatcactccctgaatcgtagtacggattgcctgaaccttgatttaaggttcctatacttggaagtgttttatcgctgtcggcgaccgagagatccccccttccattgttataaactgtccattgagaattcccagaacctgaagcaggaacaaatgaattccaggcatcatttcctccatttaagaagatacataccaatgctttatagcctgaaaaacttggagcagctgctttcaatcctaactgtggcatacccatcatcgatagacccgccagaccggactgcaaaaaatttcgtcttttcatatantttatttttgaatcataaaaaaacttgatgtaaccatgaagcgaattgcatcagaaatgacatttcttgcttcctttgcattaaactttttcccccaattcatattcattaaatgatttgtcaaggccgtataatattctgaaggcatttctcctcccataagttttttatcaaggtgctgtagtaatgattgaattgcagcctttttcttttctgaatcattaatgttattaaaatctccgtttgtatcaccgtccaaagcatattcaaaaatttgtagttcactatcgatattgatgtaataattttgttttgagtgatttcgancagaagcaaaatcctttaaggttgtattattttccaagattgcatttttttcattggtattgagtgaggacctgataaggttgtgaaatttgattaagacagtatcactttgaatttgaaattcaggtgccaccatactgttggaaatgaaatgagaatctgcaggaacgaaatcggacgcaaagaaattaaataccgtttcagatcttaatggcgattgtccgataatattttctagatagaaaaattgataaacaccattcattgttgcatttgttctgcttttccaaccatccagtggctttacatcaaaagctctaaggaattgggtcaaagctaataagggctctttaggttttccataattcccatcactgctgtattccgtctctcttgcttcaccgtccagcaaaacagcttttacaacttcttttaaatttccccgaatcccagccccatcattattgaaaatncctgcaactctgctgatataagccgatgaaggattagaagtaacaagtcttgtgattaaatgccgtcccacatgtgggcctacattttgatgctgaaagatgatttctagagcttgatcaaggtctgatggttcactgtttgatgatccttctgtaccaatcgtagaacctaaaaaggtttttgaagcatattcatgatgagttgaattaaattccatgggagaagaccattcttctccgtttgcccgactggtttttccatatttactgttacctttgatgtcataacctgtcattactttggcaagttcctcaacatcatnctgtgtgtaggaagcaataggatccccatttgaatccttaaccattgaaccatcctgattcattttccaaagccctattgaaaacaactgcatcaattctctggcaaaattttcatcaggatgggtattggaagaagaattgaattttttatttccttgatgagaaagaaatattcccattcctggacttcttgaaacttctcccatcaaagtcctgaaattcccaaatgcatactttgccaagatatcgtagtaggatgccaaagaatctcccctaaatcgagttctttgcttacttcctgatattaccatcaattcactcaatgccaatgctactcgttgtcggagctggtctttaccatggagtgcattctcaaaccaggctgcagtttggtaatcgcttgttctaccgtgaaaattattattaaagtctgaatctgattcgtatgtacttggttcagacatttttgcaatggctttatacttctgcagatgtgattggtgagaatctgttgaactatcgtaagcggaactagaatttagttgtttttcaatccattgggtcaaacctagagattgaacctcattcatatcatcttctgtgggtccaaacgtggcctgttctagaatgcggaacgcttgagctgtactaacatctgagcttgtagcttgaaccaaatcttgatcttttttctttttacaaccgatcaatatgaagaacgacaacagaagaactgagaataaaaagagacttgaaaggatgcctttcggaacttttttgtatttaatgataaatataccccatcttttncnncntnnaangnntnntnaannnnntnntnnnnnntnnnnnnnnnnnntnnnntgnntnnnnggnannnnnnncannnnnnnnaannnntcaannnntnannnnatnnnntnnttnncnnnnnnnnannnnnnntangnnnnnnnnnnnnntannnnntnaannanannnanncnnnnnnnngtnngnnngnnnnn

SEQ ID NO: 1689 - DNA, 4000 bp, Escherichia coli
  misc_feature (2031)..(2031): n is a, c, g, or t
tacctgcactcgaacgccacttttataaacaacaaaatcagggtctctagcagcaggacctgaagtctttgtcattgttaatgtgtggcttgcagctgtagctgtaaactttaaaaatgcacgatttccaagtttattataatcaccattatcatcaactgagcaaatttccacagcatctccatttacttcaacaaccttatgaataggaaggttggacgccagcccgccattatttgtttcgccagcgccgtaattttctgttgaattaataccacgctccgcagcaaatgtttcaattgctgcagcatcatcctgttgctgcgatttcaactctgctaaatatgaaaaaatcgagctaaacgctggatgatcagagtaactcgtcgcggtaaacgctgcataaataggtcccatcccgaaacgcataccgtcatcatcattagtaccgcgatcgtacaaatcataaagcacaccagcagtcgttcgctcgtcataccatcctgtattatcgttgctatctacatttattgaaaaaccctgcgactgaccgtttccataactgtcccggtaaaatgggtcgtccgtgaccatacctgaaagtgcattaccaaaaccctcccccatagcgacacgcatatcgagtttttgccccccgctgtgcggaccgcctatagaatctgaacgggacatttgatcttcaaaataatgcccccactcgtgaactactacgtgatcatcatattcatctgtatcagagtcctcatctcctagaatataaacgtttccatttcctttgtaggatgaagttcctatgtcacccgcggaatcattaccgctcactgcgcggttattaatactccagttatatttcatctctggaaaaacagcatctgggtcatctgcaatcattttttgaatggctacatatgttggagcaagcatagcaaatggagcagcggcccttgttgaagtataagaacttccgccccaaccagattgggcagttaacgcacgaatggaatctgatacgcccgaacttaataaatcgccagttaattcataaacagcattttgattggtattatcaatcacttttacattccaaccagcagtgcctgtactcgcttcctgtagcatttcagctcttgcaacaattcgtacatctgtatttggaaggacacttacactaaaatccccatttccatcagtaacagctgtgtctataataccccctgcagcattcctagcctgaactgtaatacccggagctcctcgctgaactgtagcgccatagtccaatccatttgtggaggtatttaaaggaacaagttcataactgatcttcccagtgattttcacatcatcgggtaaaggctcaacagtgacactcaatgtcgcattggcactatttcctgcagcatctgttgcagtagcggtacatacaaggtttgttgtggtggtaatagtaggggcagtgaacacaccatctgaaaaagaaccaccattggtacatgttgtcgttaacgatgtcactgcagcatcatcagtagcggttaagcttacctctgatgtttgaccagaatttacggttaagtttgcaacgctaaagctaacaacaggcgcggttgtatcaggattaactgtaactgttaaagttgcagacccttcgttgcctgcagcatcactagctgttgctgtacactcagaagtcaaagtttcacttgtttcaggagcagtaaatactccatcggaataatcaccaccattagtacaagaaacgttcggccctgttgtaatcccaacattatcagtagccgttaaagtagatgaaccagtgcccgttgaaactacagttagagaacttgggttaaattctaaagatggtgcttgagtatcaggtggtggcggggctggtggagttactgtgcttccagttccccccccgcctccaccacaggaaactattgctagcccgcctacagtgatgacagtactttgtaacagcgtcttaatgttcatatttttccnacacttttcttatattggtataaaccatttttggttttgtcaaatccattaaagaggtaaattgtcactataattggctatcaaaactaacactttttatcaacatatatatcgttttaccttcagtaagcttcagagactcaacccccgaccttgtaatccgggctgtaatttctaagtcagaaaatcttgcttttactaaagcgtagggcgattgagcatcaacactaataccaactatcatagcttctatacaattctgtatactgattttttttggtgggactaaggcaatagaaatagcatcagcatttattctaataaatattttctttccgctatagcgtctagatacatctggaaccttaattattgctccgccaatatcaacattaaccatggaaaactcgttatcttgagaaactatcattcctgaaaacaatgaagagagtttagtatcagtgtccaatgtagccacatctagttgaggtagtatttcatcaagtgatccaaaatccttaactctacccgatgacaataacatcacgtggtcagccaatctgcagacttcttctatgtcatgcgtgacataaatgcagggtatatcaaattttttaactaggttttcaataaaaggtataatggagcgttttcgtgctcggtccaaacctattagtggttcgtctaaaaataatatttcaggggctgatagaacggtcctggcaagagccacgcgccgagtttccccgccggataacacagatgggtattcagataataaagactctagttcaaaaacagaaattatttcatcaatcggtatcgcttttggtgcgcgtttttttgcaaattcgagattttgtaatacatttaaatgcggaaacaaacgcccatcttgaaacatgtacccaataggtcttttataggctgggaggtttaccttgtttttgctgtcataccataattcattcatttgaataatacctgagtctggacgcatgaagcctgatagtaattttaaaatacttgttttcccagaaccacttggcccgaatatgacagtgatacctttgcttggcaaagattggttaaccttgagggttattcttccaagtttctttaaaatatttattttcaatttatccgacatttaaaggatgcctgcgattaaaagtgtagatcaaaaataacacacaaaaagaaaatactaataatattccagaaagaatatgagcttgagtgtaatctaaagtctcaacgtgctcataaattgcaatcgacattacctttgtgcgtcctggtatatttcctcccaccattaaaataatgccaaactctccaagcgtatgcgcaaaggtcaaaattgaagcagttaagaagccgcgtttagataagggggcaacaattttgataaatacatccaatgggctagcacgcaaactcgctgcagcctctctaatctcgaagccaacattttcgaacgcgctctgtaaaggttgcaccatgaatgggagtgaataaataacagaagccagcactatcccaaaaaaggaaaagcttaagctttctccagtaaaattaatccagaaagatccaataggtgatgtaggattaaataaaataagcaaataaaatcctaaaacagtcggaggtaaaaccaaagggagggcagttaaggcttcaataaaaggcttaagtttcgaacgtgtgcatgaaagccaccatgccaatggggttccaataaaaagtaacaatactgttaccaccaaggataactttaatgttaatattaatggcccaaattcaatcattctgaggcacctcatatccagattttataatgatcttacgcgcctcatctgaacttaagaagctcaaaaaatcatgagcggctttatttgtgaggccgggtcttaataaaatagcatcttgcattattggtgtataaaagctttgcggtattctccaa

SEQ ID NO: 1690 - DNA, 4000 bp, Escherichia coli
  misc_feature (1985)..(1985): n is a, c, g, or t
  misc_feature (1992)..(1992): n is a, c, g, or t
  misc_feature (2412)..(2412): n is a, c, g, or t
  misc_feature (2662)..(2662): n is a, c, g, or t
  misc_feature (2887)..(2887): n is a, c, g, or t
  misc_feature (3074)..(3074): n is a, c, g, or t
  misc_feature (3328)..(3328): n is a, c, g, or t
  misc_feature (3547)..(3547): n is a, c, g, or t
  misc_feature (3714)..(3714): n is a, c, g, or t
  misc_feature (3736)..(3736): n is a, c, g, or t
  misc_feature (3886)..(3886): n is a, c, g, or t
  misc_feature (3914)..(3914): n is a, c, g, or t
gtgggctggttcggcttcaatgccggttcggccctggccgccgatgcgtccgcatcgctggcgatgctcaacaccatggtcgccaccgccgccggcgtggtcggctggaccctggtcgaggcgctggccaagggcaagccttcggcgctgggcgcggcctccggcgcgatcgcgggtctggtcggcgtcaccccggccgccggcacggtcgggccgatgggcgcgatcgcgatcggcctggccgccggcgtgctgtgcgtgtggggcgtgaacgggctgaagcggcggctgggcgcggacgacagcctggacgtgttcggcgtccacggcatcggcggcatcgtcggcgcattgctcaccggcgtgttcagcgcgcagtcgctgggcggcaccaaggccggcctggcgatcggcgcgcaggtatgggtgcagctggtcagcgtcgcattcaccatcgcctggtgcgcggttgtcaccgcggcggtgatgctggtggtcaaggccacggtcggcctgcgggtgagcgaggagtccgagcgcgtcggcctggacatcagttcgcacggggaatcggcctacgagtcctgaggacgcgtccgggaaccacgggcacggggcgggcggcggcggcgccgcccgttttttgcgccgccgattgcaattgcggcgtgcaggcggtgcaatgcgggaatgaagccgacccgactcctcgccgccgcctgcgtgctcgcgctcgcggcctgccagcacgccgcgccgcgcaacccgatggcgacctgggtgccttcgcggaattacgatgcgcgccgcgcgcagttgatcgtggtgcactacaccgagcaggactcggtgcagcacagcctcgacacgctgcgctcgagcaacagcggtggtcgggtgagcgcccactacctgctgggcgacgacggtcgcatctaccagctggtgtccgacgagcatcgcgcctggcacgccggcgccggccgctggggcacgatccacgaactcaattcggcctcgatcggcatcgagatcgacaacgacggccatgagcccttcaccgatgcgcagatcgatgcactgatccgcctgctggaagacctgacccgccgccaccggatcccgaagaccgaggtcatcggccattccgaccttgcccccgggcgcaagatcgaccccggcccgttgttcccgtggaagcggctgcacgaggccggcttcggcatctggcccgatcccgccgcgccgccgccgccgccgggcttcgatccggtcaacgcgctgcgcctgatcggctacccggtcgacgatctcgaagccacgatccattcctaccggatgcgtttccgcggcgacgatgccaggaccctcgacgaggaggacctgcgcatcctgaactcgctggcgacgcaggtgcacggagggcgctgaacccgcgccccggcccggatcgcattgggcggcgtcttgcactagattggtgcaatggatccagcgaaccctcttcccggccccgccctcgaccagctcggcacgccgctggcctgggccgaccgccaggcgcggatcgtgggggtcaacctggccttcccgcgctggatcggggttggtgcgcggcgtctgatcggccagccgctggccgcgctggaactggaaggcgacgccctggcccggttcctggcccaggacgagcgcgaagtgctgcgcctgcaccgcattccgctgggggtcccgggcgaggcgccgcgtcctgccgacggctggctgacccgtacccccgatggctggctgctggaggcgcatccggccgacgactccccctcggccgatccggcccaggccctgcccggcgcgctgcaggccgcactcaagggcatggcccacgaactgcgcaatccgctggccgggctcaagggcgccgcacaactgctggcccgccgcgccggtgcgcgtcccgaggccggcgacgagcgcgagttgatcgncctgatnggcgccgagatcgaccgcctcagccagctggtcgaccaactgctgtcgcccgccccgcagcgcccgcacgcgccgctgaacatccatgccgtgctcgaacgggtgctgcgcctggccgaggccgagggcggctggacgatgcgggtgcagcgcgattacgaccccagcatccccgagttccccggcgatgccgaccgcctcacccaggcggtgtggaacctggtccgcaacgcgctgcaggccggcgcctcgacgatcgtcctgcgcacccgggtcgagagcggcctgcacatccgcgagcggctgcatgcgcgcgcgctgcgggtggagatcgtcgacgacggcggcggcgtgccggaggaattggccgagcacctgttcctgccgctggtcagcggccgtgccgaaggcaccgggctnggcctggccctggctcaccaggtcgcgcgcgagcatcgcggctcgctgggtttccgctcgcgccccggccataccgtgttcaccctgctgctgccgcagaacgagcccgaaggagcgtctttgccatgagtttccctgcatgagcgccgccagcggcaaccgccgggtatgggtggtcgatgacgaccgttcggtgcgtttcgtgctggccaccgcgctgcgcgacgccggctacgaggtggacggtttngagaacgcggccagtgcgctggacgcgctgcaggtacgcggcgtgccggacctgctgttcaccgacgtgcgcatgcccggcgaggacgggctgaggttgctggaacggttgaaggcggcgcacccgcacctgccggtggtcgtgatgtcggcctacaccgacgtggccagcaccgccggcgcgttccgcggcggcgcccacgaattcctgtccaagccgttcganctcgacgatgcggtggcgctggccgcgcgcgcgttgccggcacctgcgtcctcggcgcccggggcgtcgccgccgcaggcggagccggatgccgcgggatccaccgcgaccgcgcacgagctgatcggcgacaccccggccatgcgcgcgctgttccgcgcgatcggccgcctggcgcaggtgccgntgtcggtgctggtcaccggcgagaccggcaccggcaaggaactggtggccggcgccttgcaccgcgagtcgccgcgcgcgtccgggccgttcgtcgcgctcaacaccgccgcgatcccggccgagttgctggagagcgaactgttcggccacgaggccggcgccttcaccggcgcgaaccggcgccatgtcggccgcttcgagcaggcccacggcggcaccctgttcctggacgagatcggcgacatgccggcntcgctgcagacccggctgttgcgggtgctggccgagggcgagttcttccgcgtcggcgggcgcgagctgatccgggtggacgtgcgggtgatcgccgccacccaccaggacctggaggcgcgggtcgccgaaggccgcttccgcgccgacctgctgcaccggctcgatgtggtacggctgcggatcccgccgctgcgcgagcgtcgagccgacatcccnctactggccgccaccttcctgcatcgcgccgcgcacaagctcggcgccggcgccaagaacttcgatccggcggcgctggccgcgttgcaggcgatggactggccgggcaacgtgcgcgaactgcagaacctgtgctggtcgctggccgcgctggcaccgggcgaaancattaccgcgggggatctgggnatgctccaggccccggcggccgccagcgcggcgacaccgccggtggagtgggatcgccagctcggccagtgggcgctgcaaagcctgcaggccggtgcgcgcgacctgcatgcgcaggcgcggatgcgcttcgaacaggccctgctcaangccgccctgcagcacaccggcggccgcngggtggaagccgccgcgctgctcggcgtgggccgcaacaccgtcacccgcaagctcggtcccgggcgcaagcgtcgctgacggctt

SEQ ID NO: 1691 - DNA, 4000 bp, Escherichia coli
  misc_feature (97)..(97): n is a, c, g, or t
  misc_feature (127)..(127): n is a, c, g, or t
  misc_feature (147)..(148): n is a, c, g, or t
  misc_feature (331)..(332): n is a, c, g, or t
  misc_feature (334)..(334): n is a, c, g, or t
  misc_feature (559)..(559): n is a, c, g, or t
  misc_feature (607)..(607): n is a, c, g, or t
  misc_feature (707)..(707): n is a, c, g, or t
  misc_feature (713)..(713): n is a, c, g, or t
  misc_feature (728)..(728): n is a, c, g, or t
  misc_feature (794)..(794): n is a, c, g, or t
  misc_feature (827)..(827): n is a, c, g, or t
  misc_feature (890)..(890): n is a, c, g, or t
  misc_feature (971)..(971): n is a, c, g, or t
  misc_feature (1028)..(1028): n is a, c, g, or t
  misc_feature (1151)..(1151): n is a, c, g, or t
  misc_feature (1184)..(1184): n is a, c, g, or t
  misc_feature (1304)..(1304): n is a, c, g, or t
  misc_feature (1364)..(1364): n is a, c, g, or t
  misc_feature (1391)..(1391): n is a, c, g, or t
  misc_feature (1463)..(1463): n is a, c, g, or t
  misc_feature (1469)..(1469): n is a, c, g, or t
  misc_feature (1499)..(1499): n is a, c, g, or t
  misc_feature (1502)..(1502): n is a, c, g, or t
  misc_feature (1589)..(1589): n is a, c, g, or t
  misc_feature (1637)..(1637): n is a, c, g, or t
  misc_feature (1796)..(1796): n is a, c, g, or t
  misc_feature (1988)..(1988): n is a, c, g, or t
  misc_feature (2006)..(2006): n is a, c, g, or t
  misc_feature (2509)..(2509): n is a, c, g, or t
  misc_feature (2563)..(2563): n is a, c, g, or t
  misc_feature (2584)..(2584): n is a, c, g, or t
  misc_feature (2683)..(2683): n is a, c, g, or t
  misc_feature (3301)..(3301): n is a, c, g, or t
  misc_feature (3307)..(3307): n is a, c, g, or t
  misc_feature (3412)..(3412): n is a, c, g, or t
  misc_feature (3484)..(3484): n is a, c, g, or t
atcaaacaaaaaggtcctttgcttagaggatgaagaggcgattttgcgaaatatctgcgcctcgctggagctctttttcgcagaggttaaaggcgtnacagacggctttgatgcgcttgagcttgcnatgagcggggcgtatgacgnnctagtgcttgatatcagcgtgccaaatatcgatggtcttgagatcgctaaaaaagtaagagctatcaatcaaaaaatccctatcgtgatcttatcaagccacgtcgagcaagagtatctgtggcgcgcggttgagctaaagatcacaagatatcttgcaaaaccatacgataaaaaatctttnntnaaagcgcttgaagatgtggcttttgagctagttggacgcacaccaactatcaggctaaatgacgagcttgagtatgattttggcaaaaaagcgctttatgtaaatggcgaaatttctcatctaagcaagagcgagagcaagcttttggagtactttttaaacaacaaaaaccaaactatcacttatgagcaaatttttgactacatctgggactacgagcagccnacaaaagaggcgataaagacgatcgtaaaagagcttagaagaaagctnggcaaagatgtgatcaaaaatttatacggcgtgggctatctttgtgagatataaatttcagctaatagtcggtgcttttatctttgtctatctgctagtntcggcncttgttttaaatttntacaacgatcttgcgatgaaagacgccaaaaaagaggcgtattatgttttagagggcataaattcngtaagagagtacatcgctggagttcagcgcccnctaatcgagcagttaaaagagcagggcatcttaaaagaggacttttttgacgagagacttctntcatcttcatatataagccgtgaaatttacaacatccaaaagaaaaaatacaaccttgaatttgactacaagctagttgcnatcgctccgctaaataaagctcacgagccaaatgaatttgaagctggcgtcttgcanggctttaaagagaataaatttaaagaatttgtaaagataataaaagatgaaaatggctcacagctctttgtgggtctgcctataaaaaaccaaagtccaagctgtctagcctgtcatagcagngcaaatgccccacaacaaatgctagaaaaatanggcatggagggcatagagatcccagacgtgaacgaaacggtcgcgatgatctcttttaagataccaatccgcgccatttttacctaccacttgcaagaggtcatcgtcataatgagcgcnataacgcttatctttgggctatttttgctacttgtttataagatgcataggcgaggcgangagagcaaaaagcagactgagcagctnatgatacatcaaagccgcctagcctctatgggcgagatgataggcaatatctcgcaccagtggaagcagccncttgcncagataagctcagctttgataaatttaganctntatcaggagcgaaaaaagcttgatgaggcgaaaatttatgagtttatagaagagacaagcaagcagataaatttcatgtcagaaacngttgatgactttaaaaatttctttagtccaaataccttgagaaaagantttaaggtgcttgaagtgataaatcaaacgataaaaattttaaacgcaacgcttaaaaagtatcagatcgaagtgcagcttgacgtgagagaaaattttgaggtatttgcaaattttaatgagataatccaaattttaataaacatcataaacaacgcnaaagacgcatttaagcagagctacacaaagccaagagtgataaagataagcgcctttttaaaagatgatcgcaagaatttatgcgtgcaaaataacgcaggagcgataaaaaattcatttttaaaggtcatctttgagccacactttagcacaaaagagagcggtagcgggcttgggctatatatgagccgncttatcgctcgcaaaaanaacgccctaatctttgctaaaaatgtggatgaaaaccacgttgcatttacaattagtttcgaaaatttataatttgttaattttcccccttttctgcccttttttggtgttaagattatcagtatgaaatcattttgattttaggataaaaattcaaaggaggagacgtgagaaacttacacaaagccttagcaggcttactcatgggtgttagtatctttgcttcacaagcctgttgcgaagagcataatatgcagatgtccgataaagcacgtgatgttatcgcaaatcctaaaggcacactgcaaagtagaggtgttgtctccttgcaagactacgtcgtagaagagcaagagatgtataactggctatttaaaaaccaccctatttttacaaagtatggtggcaaaaccgtcggcaaaatggtcgttcatgaccgtggcttagagtggcttgccgagggacatggctttgatatgtcaaagcttagtaaaagagatggnggtaagggctatagctctatgatgtatagaattccagccacctcatcacttcantttcctaataaatttgtaggnccagaaaagtgcggtgagtgtcacccagctcagtatgaggtctggagcagatctcgccacgcaactactatgcgcttccctggcgagcacccagaggtnaataacaacctaactgagccagtatttgacaaagataccgcttctatccttccaaaaggtatcactccagatgtcatctacgcaaccgttggtcacttaagaactaagatgggctacgtcgatgcatggctacttcgtggtacttactacgttgagggcggtttgctaagagatggcacaggtcagatcgtagctggcggtaaccaatggcaaagaacatgggcgttaaatttagacgacgcaactgttaaaaagataaaagagctcgtcccagaatttcctggcacgcttgaagagtatggcgataatggcggatatgttagaggtcttgcctcatacgccgcaaaacataaaaagtcgatgtttttccaagcaaactcatcatattgtgaggtttgccacccagttaaatttgactttaagtcaaaagcagaattttacgcagcacttggtaatgccaaagagcttcaaaaacacactatctcaaaaggcgtaagctgtgaggagtgccacggagctggcggtcaccttgatggagctacaaattttagaacatcaaactgcgaacgctgtcaccaaagatttaactttagcccagatctaatgcgagctaacccncttaanaacggcaagcttgatctctcactaagctctaaatttaaatcaatgggaccaggatgcggctcagaaggctcacaatcatactttaccgctcactacgataaaggnatgagatgcgtcacttgccacgatccacacgacaacacaggtaacgttgtaggcgataagagcgtaactggnatgaactacaacccagatcaaggctatctaagtgcgttctacactaaaccaaagatcaaaaaagattgtaaagattgtcacgagactcaagcatatatcgcatcaaaagcagatactcacaaaaacaacacttgtgcatcttgccacatgccatttatgatgagctgcgagaatttctacgctgttcagttccaagacaacgctggctttgatactcaaagacgctctcacatctggaagatcatggtcgatccaaaagagaaatctcttgtcccaggcgacgctgctaaaggtccaagagatgctaaagattggcactttgagagagataaaaatggccacaactatgttgatttgatgtgggcatgcgctagaacatcttgggctgataaagatatgaaagataataaaggctgccatagcccagtgctatctgagctaaaaccaacacttcacttcaaaaaccaaaaacaagtttatgatgaggttatgggatggcaaactccagttaaaaat

SEQ ID NO: 1692 - DNA, 4000 bp, Escherichia coli
  misc_feature (509)..(509): n is a, c, g, or t
  misc_feature (576)..(576): n is a, c, g, or t
  misc_feature (948)..(948): n is a, c, g, or t
  misc_feature (1528)..(1528): n is a, c, g, or t
  misc_feature (1540)..(1540): n is a, c, g, or t
  misc_feature (1544)..(1544): n is a, c, g, or t
  misc_feature (1574)..(1574): n is a, c, g, or t
  misc_feature (1795)..(1795): n is a, c, g, or t
  misc_feature (1815)..(1815): n is a, c, g, or t
  misc_feature (1966)..(1967): n is a, c, g, or t
  misc_feature (1974)..(1974): n is a, c, g, or t
  misc_feature (1976)..(1977): n is a, c, g, or t
  misc_feature (1987)..(1987): n is a, c, g, or t
  misc_feature (2861)..(2861): n is a, c, g, or t
agaaaatctgagacagtaactattgcagggaatcaattagcaacacctattactgcgggtgtaaatgaaactttccaaccatttgatgaagaaagatattcattgattaggtccgatggatctacagaactattaactgcagataaatttggatttagtgctgcttcaacatcacttcaaatttataatttaggagcagctgatggtgcagcaagactaacatatacgttgaagaaaactaaacccaaagcaaagaaaaagagaaaaaatagagttaatacagttataattgataaatccactcttgaaggatctggttctggtgatggaactcttgatgatggattaacatatggtagttatccatatggaacaagagttcaagatgataaaatttcactaaatcttgctgatcttgttgaagttcatggcatttatgaatcaacagatattacagaaccttctgcgcctacggttatattgtcttctatttctggacctgcaggtantacatcagatctcatacttggtgaaaaaattataggtcagaatagtaaagcaattggtattgttgcngcaaaacttacagattctcaagttgcatttattcccaaaaattcatataatttaagagaaggtgaagttgtaaaatttgaagaatctaaaattcaagcaacagtttcccaattaaatgaatctagttttaatatttcaaaacattatagttatactgctggacagcgtggatctttctatgactatggatctataaacagaaaagatgattttgaagcacctacaaagcagttgaaaatttatttttcaaatggatattatgattccagcgatgatggagatattacaacagttgattcatacaccgaatcatttgattatactactgacattagatttataaatggagagagattaactgatattattganattagaccgaaagtttctacttatacagttgctgcagacgcaaggtctccgtttgagttttatggtagaacatttaatgaagcaggaaattctgctgcaaatattttagcatcagacgaatctcttaatttcacatattcattctatcttgcaagaatagatagaatttatctcactaaggatggaaaattccaaattcaatatggagattcggcagaaattccagatttgcccgtaccaattgataatgcaattgaaattgcaagaataaatcttcctccatatctttatcaaccttctcaagcttcaattgattttatggagcataagagatatagaatggtcgatattagacaacttgagaagagaattaaaaatcttgaatattatacatcattaagtttacttgaaacaaacactgctaatatgtttgttgctgatagtcaaggtttgaatagatttaaatctggattctttgttgataactttactaatgcaagaactcaagagaatgaacttccttataaaaatagtattgatattggaaataaaacattaaaacctcaacattatacaaatncaattgatcttnttcnaggtcctgttgttaatgttgatcctacagnggatttagcattcaggtctcccgaaggtattaatataagaaaaacttctgatgtaattactcttgattatgctgaagttgaatggttatctcaaaattttgctactagaactgaaagtgtaacaccatttttggtaagtttttggcaaggttcgcttacattaacacctgccacagatacttggattgatactacaagattagaagcaaagattattaaanctgaaggtgattataatganaccatgagacagatggttgaaaataataatgttgatccacaaactggatttgctcctactatttggaatgcatgggaaaccaattggacgggaagtgatgttacgacatccacaagaaccagaacgattaggagtggtagagtaccatctnntcgtggncnnggtggtacgnctcgccaacggacaattaattatacactgacaaatacagttattcaagaaacgttaagagaacaaagagatactggtgtaagatcaagaactggaagtagacttagtgttactgaacaatgggataatacttctgttggagatagagttgtaagtagagatgctgttccttatatgaggtccagaaatattcaatttgttaataagaaagttaaaccacttacaaaaatgtttgctttctttgatggaatgaatgtaactagattctgtgttccaaaacttcttgaaatttctatgacttctggcacatttgatgttggagaaactgtaattggaactgcacagcgaatgggtgttggacctaattgggaagcatcaagtccaaaaataacattcagaactgcacgatcaaatcataagtctggtgaatataattttcctacaaccacatataagcaaaacccatataattcacggccacttgctgaatcttattcatcatcatcaacaactttgaatattgatacattctcattacaagaacaggcacaaggtgagtattttggttgggttgaaccaggaatgattcttgttgggcaaacaagtggtgctcaagcaacaattacagaccatagattgatttctgatatagctgcagacttaaatggtagtttctttattcctaatccgaatattgagacaaatccaaaatttgaagcgggaacaaaagtacttacttttgttaatgatagcgcaaacaatcaagaaactgcgactacaatttctgaagaaggatacaatgcaacaggaactcttgaaacagtacaggaaaatattatttctgtgaggaatgcaagagttcaaaataaacttanatttgaagatcacgcagttaatagaacaactggaatgcaagttattcagactagaactctgagtagtcatacatcacgtcatagtatgactcaatattatgatcctttggcgcaatcattcttagttgatgaagaaggtggtatctttattacaagatgtgacatattctttaggagtaaggatgatgataatattccagtaactcttcagattagaacaatgaaggagggaacaccaacacaaaaggttttaccattctccgaaattattttaaatccagatgatattactacttctggagatggatctgttgcgacaccatttgtatttgatgctcctgtttatcttgacggaaatgatgaatatgctatttgtgtagcatcaaattctactaagtatagcgtttatatttctagaattggtgaaaatgatctcttaactgatgcatttatctcaaaccaaccatatcttggttcactctttaaatcacagaatgcttctacttgggaacccagtcaatgggaagacttgaagtttgttctttatagagcagattttgttgataaaggtacagttgagttttataatcctgcattaagtgaaggaaatggacaaattccaacattgatggatgattcattgtctatgaattcaagaaaagtaagagttgcactttccacaacaattaatgatccagatctttctgttggtaatattattagtcagacaggaaataatgcaactggtaattatgttggagctgctggtagtgcgacaggaactttaaatgttattaatgttggaattggatacactggtccatttacttatcctggagttaatttaacaacacttactggagatggtagtaatgcaactgctgatattcaagttaaaattgatggaacagttggatttgcaactattttagcaggtggatctggatatttgatcggtgatactcttggcgtaactactattggaagtaataatgttggtactgcattacgactatctgtcacatcaattggaagtactaatgaatttattattaataatgttcaaggaaactttatttctgttggatcggcatctactgttcaatttattaatggatcaggaataacaacagcattaa

SEQ ID NO: 1693 - DNA, 4000 bp, Escherichia coli
  misc_feature (2)..(3): n is a, c, g, or t
  misc_feature (5)..(5): n is a, c, g, or t
  misc_feature (8)..(8): n is a, c, g, or t
  misc_feature (10)..(10): n is a, c, g, or t
  misc_feature (15)..(15): n is a, c, g, or t
  misc_feature (18)..(21): n is a, c, g, or t
  misc_feature (30)..(30): n is a, c, g, or t
  misc_feature (32)..(34): n is a, c, g, or t
  misc_feature (36)..(36): n is a, c, g, or t
  misc_feature (38)..(38): n is a, c, g, or t
  misc_feature (41)..(41): n is a, c, g, or t
  misc_feature (45)..(45): n is a, c, g, or t
  misc_feature (47)..(48): n is a, c, g, or t
  misc_feature (54)..(54): n is a, c, g, or t
  misc_feature (57)..(57): n is a, c, g, or t
  misc_feature (59)..(59): n is a, c, g, or t
  misc_feature (61)..(61): n is a, c, g, or t
  misc_feature (65)..(66): n is a, c, g, or t
  misc_feature (68)..(68): n is a, c, g, or t
  misc_feature (70)..(71): n is a, c, g, or t
  misc_feature (73)..(76): n is a, c, g, or t
  misc_feature (78)..(78): n is a, c, g, or t
  misc_feature (80)..(82): n is a, c, g, or t
  misc_feature (84)..(86): n is a, c, g, or t
  misc_feature (88)..(90): n is a, c, g, or t
  misc_feature (93)..(100): n is a, c, g, or t
  misc_feature (103)..(103): n is a, c, g, or t
  misc_feature (105)..(105): n is a, c, g, or t
  misc_feature (107)..(111): n is a, c, g, or t
  misc_feature (114)..(114): n is a, c, g, or t
  misc_feature (116)..(116): n is a, c, g, or t
  misc_feature (120)..(122): n is a, c, g, or t
  misc_feature (124)..(124): n is a, c, g, or t
  misc_feature (128)..(129): n is a, c, g, or t
  misc_feature (131)..(132): n is a, c, g, or t
  misc_feature (137)..(137): n is a, c, g, or t
  misc_feature (139)..(147): n is a, c, g, or t
  misc_feature (150)..(151): n is a, c, g, or t
  misc_feature (153)..(153): n is a, c, g, or t
  misc_feature (157)..(158): n is a, c, g, or t
  misc_feature (160)..(162): n is a, c, g, or t
  misc_feature (166)..(166): n is a, c, g, or t
  misc_feature (168)..(168): n is a, c, g, or t
  misc_feature (173)..(174): n is a, c, g, or t
  misc_feature (178)..(178): n is a, c, g, or t
  misc_feature (180)..(180): n is a, c, g, or t
  misc_feature (184)..(184): n is a, c, g, or t
  misc_feature (186)..(186): n is a, c, g, or t
  misc_feature (188)..(188): n is a, c, g, or t
  misc_feature (190)..(192): n is a, c, g, or t
  misc_feature (195)..(195): n is a, c, g, or t
  misc_feature (197)..(198): n is a, c, g, or t
  misc_feature (200)..(205): n is a, c, g, or t
  misc_feature (207)..(216): n is a, c, g, or t
  misc_feature (218)..(218): n is a, c, g, or t
  misc_feature (220)..(221): n is a, c, g, or t
  misc_feature (223)..(225): n is a, c, g, or t
  misc_feature (227)..(228): n is a, c, g, or t
  misc_feature (236)..(237): n is a, c, g, or t
  misc_feature (241)..(242): n is a, c, g, or t
  misc_feature (245)..(245): n is a, c, g, or t
  misc_feature (251)..(254): n is a, c, g, or t
  misc_feature (258)..(258): n is a, c, g, or t
  misc_feature (260)..(261): n is a, c, g, or t
  misc_feature (263)..(265): n is a, c, g, or t
  misc_feature (268)..(268): n is a, c, g, or t
  misc_feature (271)..(274): n is a, c, g, or t
  misc_feature (279)..(281): n is a, c, g, or t
  misc_feature (284)..(284): n is a, c, g, or t
  misc_feature (286)..(289): n is a, c, g, or t
  misc_feature (291)..(292): n is a, c, g, or t
  misc_feature (294)..(297): n is a, c, g, or t
  misc_feature (299)..(299): n is a, c, g, or t
  misc_feature (301)..(301): n is a, c, g, or t
  misc_feature (303)..(304): n is a, c, g, or t
  misc_feature (306)..(307): n is a, c, g, or t
  misc_feature (309)..(309): n is a, c, g, or t
  misc_feature (313)..(314): n is a, c, g, or t
  misc_feature (316)..(316): n is a, c, g, or t
  misc_feature (318)..(318): n is a, c, g, or t
  misc_feature (320)..(320): n is a, c, g, or t
  misc_feature (324)..(324): n is a, c, g, or t
  misc_feature (326)..(328): n is a, c, g, or t
  misc_feature (330)..(334): n is a, c, g, or t
  misc_feature (338)..(338): n is a, c, g, or t
  misc_feature (341)..(341): n is a, c, g, or t
  misc_feature (343)..(344): n is a, c, g, or t
  misc_feature (351)..(358): n is a, c, g, or t
  misc_feature (360)..(360): n is a, c, g, or t
  misc_feature (362)..(362): n is a, c, g, or t
  misc_feature (364)..(364): n is a, c, g, or t
  misc_feature (368)..(368): n is a, c, g, or t
  misc_feature (371)..(371): n is a, c, g, or t
  misc_feature (373)..(373): n is a, c, g, or t
  misc_feature (375)..(375): n is a, c, g, or t
  misc_feature (377)..(378): n is a, c, g, or t
  misc_feature (380)..(382): n is a, c, g, or t
  misc_feature (384)..(384): n is a, c, g, or t
  misc_feature (388)..(388): n is a, c, g, or t
  misc_feature (390)..(391): n is a, c, g, or t
  misc_feature (394)..(397): n is a, c, g, or t
  misc_feature (399)..(399): n is a, c, g, or t
  misc_feature (401)..(405): n is a, c, g, or t
  misc_feature (409)..(412): n is a, c, g, or t
  misc_feature (415)..(415): n is a, c, g, or t
  misc_feature (417)..(417): n is a, c, g, or t
  misc_feature (419)..(419): n is a, c, g, or t
  misc_feature (421)..(425): n is a, c, g, or t
  misc_feature (427)..(432): n is a, c, g, or t
  misc_feature (434)..(436): n is a, c, g, or t
  misc_feature (438)..(440): n is a, c, g, or t
  misc_feature (442)..(443): n is a, c, g, or t
  misc_feature (445)..(447): n is a, c, g, or t
  misc_feature (450)..(459): n is a, c, g, or t
  misc_feature (462)..(463): n is a, c, g, or t
  misc_feature (465)..(465): n is a, c, g, or t
  misc_feature (469)..(469): n is a, c, g, or t
  misc_feature (471)..(472): n is a, c, g, or t
  misc_feature (474)..(487): n is a, c, g, or t
  misc_feature (489)..(494): n is a, c, g, or t
  misc_feature (496)..(496): n is a, c, g, or t
  misc_feature (498)..(503): n is a, c, g, or t
  misc_feature (505)..(505): n is a, c, g, or t
  misc_feature (508)..(509): n is a, c, g, or t
  misc_feature (513)..(513): n is a, c, g, or t
  misc_feature (517)..(519): n is a, c, g, or t
  misc_feature (522)..(523): n is a, c, g, or t
  misc_feature (525)..(525): n is a, c, g, or t
  misc_feature (527)..(527): n is a, c, g, or t
  misc_feature (530)..(530): n is a, c, g, or t
  misc_feature (533)..(535): n is a, c, g, or t
  misc_feature (537)..(542): n is a, c, g, or t
  misc_feature (544)..(551): n is a, c, g, or t
  misc_feature (553)..(554): n is a, c, g, or t
  misc_feature (556)..(557): n is a, c, g, or t
  misc_feature (559)..(559): n is a, c, g, or t
  misc_feature (561)..(563): n is a, c, g, or t
  misc_feature (565)..(565): n is a, c, g, or t
  misc_feature (568)..(574): n is a, c, g, or t
  misc_feature (577)..(580): n is a, c, g, or t
  misc_feature (582)..(598): n is a, c, g, or t
  misc_feature (600)..(601): n is a, c, g, or t
  misc_feature (603)..(604): n is a, c, g, or t
  misc_feature (607)..(608): n is a, c, g, or t
  misc_feature (610)..(615): n is a, c, g, or t
  misc_feature (618)..(620): n is a, c, g, or t
  misc_feature (623)..(623): n is a, c, g, or t
  misc_feature (627)..(636): n is a, c, g, or t
  misc_feature (638)..(642): n is a, c, g, or t
  misc_feature (644)..(655): n is a, c, g, or t
  misc_feature (657)..(658): n is a, c, g, or t
  misc_feature (661)..(665): n is a, c, g, or t
  misc_feature (667)..(671): n is a, c, g, or t
  misc_feature (673)..(674): n is a, c, g, or t
  misc_feature (676)..(681): n is a, c, g, or t
  misc_feature (683)..(683): n is a, c, g, or t
  misc_feature (686)..(686): n is a, c, g, or t
  misc_feature (688)..(688): n is a, c, g, or t
  misc_feature (690)..(692): n is a, c, g, or t
  misc_feature (694)..(695): n is a, c, g, or t
  misc_feature (697)..(699): n is a, c, g, or t
  misc_feature (702)..(702): n is a, c, g, or t
  misc_feature (704)..(707): n is a, c, g, or t
  misc_feature (709)..(709): n is a, c, g, or t
  misc_feature (714)..(715): n is a, c, g, or t
  misc_feature (718)..(718): n is a, c, g, or t
  misc_feature (720)..(722): n is a, c, g, or t
  misc_feature (724)..(729): n is a, c, g, or t
  misc_feature (731)..(732): n is a, c, g, or t
  misc_feature (734)..(739): n is a, c, g, or t
  misc_feature (741)..(741): n is a, c, g, or t
  misc_feature (743)..(744): n is a, c, g, or t
  misc_feature (746)..(746): n is a, c, g, or t
  misc_feature (749)..(750): n is a, c, g, or t
  misc_feature (752)..(752): n is a, c, g, or t
  misc_feature (754)..(756): n is a, c, g, or t
  misc_feature (760)..(760): n is a, c, g, or t
  misc_feature (762)..(769): n is a, c, g, or t
  misc_feature (771)..(771): n is a, c, g, or t
  misc_feature (773)..(778): n is a, c, g, or t
  misc_feature (780)..(781): n is a, c, g, or t
  misc_feature (784)..(784): n is a, c, g, or t
  misc_feature (787)..(787): n is a, c, g, or t
  misc_feature (789)..(794): n is a, c, g, or t
  misc_feature (797)..(798): n is a, c, g, or t
  misc_feature (802)..(802): n is a, c, g, or t
  misc_feature (804)..(805): n is a, c, g, or t
  misc_feature (807)..(807): n is a, c, g, or t
  misc_feature (809)..(809): n is a, c, g, or t
  misc_feature (812)..(812): n is a, c, g, or t
  misc_feature (814)..(814): n is a, c, g, or t
  misc_feature (816)..(817): n is a, c, g, or t
  misc_feature (819)..(822): n is a, c, g, or t
  misc_feature (824)..(824): n is a, c, g, or t
  misc_feature (826)..(827): n is a, c, g, or t
  misc_feature (829)..(833): n is a, c, g, or t
  misc_feature (835)..(838): n is a, c, g, or t
  misc_feature (841)..(843): n is a, c, g, or t
  misc_feature (848)..(848): n is a, c, g, or t
  misc_feature (852)..(852): n is a, c, g, or t
  misc_feature (854)..(854): n is a, c, g, or t
  misc_feature (857)..(858): n is a, c, g, or t
  misc_feature (860)..(860): n is a, c, g, or t
  misc_feature (865)..(868): n is a, c, g, or t
  misc_feature (870)..(870): n is a, c, g, or t
  misc_feature (873)..(876): n is a, c, g, or t
  misc_feature (881)..(882): n is a, c, g, or t
  misc_feature (884)..(885): n is a, c, g, or t
  misc_feature (888)..(888): n is a, c, g, or t
  misc_feature (890)..(892): n is a, c, g, or t
  misc_feature (894)..(896): n is a, c, g, or t
  misc_feature (899)..(899): n is a, c, g, or t
  misc_feature (901)..(902): n is a, c, g, or t
  misc_feature (905)..(905): n is a, c, g, or t
  misc_feature (908)..(910): n is a, c, g, or t
  misc_feature (913)..(913): n is a, c, g, or t
  misc_feature (917)..(919): n is a, c, g, or t
  misc_feature (921)..(927): n is a, c, g, or t
  misc_feature (929)..(931): n is a, c, g, or t
  misc_feature (936)..(937): n is a, c, g, or t
  misc_feature (939)..(939): n is a, c, g, or t
  misc_feature (944)..(947): n is a, c, g, or t
  misc_feature (950)..(951): n is a, c, g, or t
  misc_feature (961)..(961): n is a, c, g, or t
  misc_feature (963)..(964): n is a, c, g, or t
  misc_feature (967)..(967): n is a, c, g, or t
  misc_feature (969)..(972): n is a, c, g, or t
  misc_feature (974)..(974): n is a, c, g, or t
  misc_feature (976)..(976): n is a, c, g, or t
  misc_feature (978)..(982): n is a, c, g, or t
  misc_feature (984)..(986): n is a, c, g, or t
  misc_feature (988)..(989): n is a, c, g, or t
  misc_feature (992)..(992): n is a, c, g, or t
  misc_feature (994)..(1013): n is a, c, g, or t
  misc_feature (1015)..(1015): n is a, c, g, or t
  misc_feature (1017)..(1017): n is a, c, g, or t
  misc_feature (1019)..(1020): n is a, c, g, or t
  misc_feature (1023)..(1023): n is a, c, g, or t
  misc_feature (1027)..(1029): n is a, c, g, or t
  misc_feature (1033)..(1033): n is a, c, g, or t
  misc_feature (1035)..(1035): n is a, c, g, or t
  misc_feature (1037)..(1038): n is a, c, g, or t
  misc_feature (1040)..(1040): n is a, c, g, or t
  misc_feature (1042)..(1046): n is a, c, g, or t
  misc_feature (1048)..(1049): n is a, c, g, or t
  misc_feature (1051)..(1052): n is a, c, g, or t
  misc_feature (1055)..(1055): n is a, c, g, or t
  misc_feature (1057)..(1058): n is a, c, g, or t
  misc_feature (1061)..(1065): n is a, c, g, or t
  misc_feature (1067)..(1068): n is a, c, g, or t
  misc_feature (1071)..(1071): n is a, c, g, or t
  misc_feature (1078)..(1080): n is a, c, g, or t
  misc_feature (1082)..(1082): n is a, c, g, or t
  misc_feature (1084)..(1087): n is a, c, g, or t
  misc_feature (1090)..(1092): n is a, c, g, or t
  misc_feature (1094)..(1094): n is a, c, g, or t
  misc_feature (1098)..(1098): n is a, c, g, or t
  misc_feature (1100)..(1100): n is a, c, g, or t
  misc_feature (1102)..(1103): n is a, c, g, or t
  misc_feature (1106)..(1107): n is a, c, g, or t
  misc_feature (1110)..(1110): n is a, c, g, or t
  misc_feature (1112)..(1113): n is a, c, g, or t
  misc_feature (1117)..(1118): n is a, c, g, or t
  misc_feature (1122)..(1122): n is a, c, g, or t
  misc_feature (1126)..(1127): n is a, c, g, or t
  misc_feature (1129)..(1131): n is a, c, g, or t
  misc_feature (1133)..(1133): n is a, c, g, or t
  misc_feature (1136)..(1136): n is a, c, g, or t
  misc_feature (1138)..(1140): n is a, c, g, or t
  misc_feature (1143)..(1145): n is a, c, g, or t
  misc_feature (1147)..(1149): n is a, c, g, or t
  misc_feature (1151)..(1151): n is a, c, g, or t
  misc_feature (1155)..(1155): n is a, c, g, or t
  misc_feature (1158)..(1158): n is a, c, g, or t
  misc_feature (1160)..(1163): n is a, c, g, or t
  misc_feature (1165)..(1165): n is a, c, g, or t
  misc_feature (1167)..(1167): n is a, c, g, or t
  misc_feature (1169)..(1169): n is a, c, g, or t
  misc_feature (1171)..(1171): n is a, c, g, or t
  misc_feature (1173)..(1173): n is a, c, g, or t
  misc_feature (1175)..(1175): n is a, c, g, or t
  misc_feature (1177)..(1177): n is a, c, g, or t
  misc_feature (1179)..(1179): n is a, c, g, or t
  misc_feature (1181)..(1181): n is a, c, g, or t
  misc_feature (1183)..(1184): n is a, c, g, or t
  misc_feature (1186)..(1186): n is a, c, g, or t
  misc_feature (1191)..(1193): n is a, c, g, or t
  misc_feature (1198)..(1198): n is a, c, g, or t
  misc_feature (1200)..(1202): n is a, c, g, or t
  misc_feature (1206)..(1206): n is a, c, g, or t
  misc_feature (1210)..(1210): n is a, c, g, or t
  misc_feature (1212)..(1213): n is a, c, g, or t
  misc_feature (1261)..(1261): n is a, c, g, or t
  misc_feature (1990)..(1990): n is a, c, g, or t
tnnanggngntactnccnnnntaaaaatantnnnantnacnggantnncattanctntntnagtnncngnnannnnanannntnnntnnntannnnnnnnacnancnnnnntanantcannnanattnncnntaatncnnnnnnnnntcnnantttnntnnnctananccgtnnctgntntaanananannncancnntnnnnnntnnnnnnnnnntngnntnnntnnccgttacnntcannttntttgtnnnnaatncnncnnntgnaannnnaatannngcnannnnanntnnnntngncnnanngntgtnntngncnatantnnngnnnnnattnttnannactacannnnnnnnancntnattngtnantntnnannntncatngnnccnnnncngnnnnngatnnnnatnancncnnnnntnnnnnntnnntnnntnnannnaannnnnnnnnnccnngntcananntnnnnnnnnnnnnnnannnnnngntnnnnnntnacnngtanctgnnntgnntntnagngtnnngnnnnnntnnnnnnnncnntnnanannnanaannnnnnncgnnnntnnnnnnnnnnnnnnnnngnnannggnntnnnnnntannnttnagtnnnnnnnnnntnnnnngnnnnnnnnnnnnannaannnnngnnnnncnngnnnnnncnggntngnnnanntnnnttnannnnantgtanncgntnnncnnnnnntnncnnnnnntncnntnaanncnannnttgncnnnnnnnntncnnnnnntnnaanttntnnnnnngcnntggntnngntngtntncnngnnnnangnnannnnntnnnnccnnntattnccgntnttnntncaaannnnantannnntaacnntnntantnnngnnnttngnntcnttnnngtntgtnnntnnnnnnncnnntctanntngttannnnatnnaaacaaattnannacnannnntntnannnnntnnntnnggntnnnnnnnnnnnnnnnnnnnnanananntantagnnncccnantnntngnnnnnanngnnggntnnttnnnnnannaanttattgnnngntnnnntgnnncntttngntnnggnnaantnntagnntccnattnngnnntnttngnnnagnnnannntngttnatncnnnnanancncntntngntnantnntntttannnaaaanannntacngcantnntcgatgttatgaggtacatatctagcgggcaagatgcccgcactacangagtttggtgatttaactttatacctcacaagaacagcaattctccgtattatgaggtacgtatctagcgggcaagatgcccgcaccacaagagtttggtgattagctttatacctcagaagagcggaaaatgctgtatcattgccctgggtggtgaggtatatactaatttattccctattccctacccagagtcaatttctcagcattttgctatgtctataaaaacactaagcaaaagtgaaattgttagcagtcagggtactagatgtaattcctagtaatgaagctaactccgtatttcctaccttaatcaaagtatcaccaccaacttgagataatgtcaaattagtgaactgagtagcagtagaaataccaccaataacaatgacatcagttcctaaagtgaaatcagtgacaatgtttttggttgtgggtaacgtagcattggcaatgtaaaacttgtcaatacctataccaccagttaagcggtttccaccaccagcaccagcaaataacacatcatcaccatcaccaccggataggtaatcattgatattagcgtaaagagtgtcatctccagaaccaccatagagacggttattattaccactactacggagagtatctttacctgaaccaccaaacaggaattgaccagaaccttcaactacttggaggttgtcatcaccagcagcgccgaacacattgttacttatgctactttgnactacgttgatcgtatcattaccattaccaccatctacattggtgttaccagcgggaccacttgcaccaatattgacagtatcattaccttccccagtaaatacggaagagtcactacttacagttacaaagtcgtcaccattaccagcattgattgtagccttaggtgcgctggattctactatatctgcaccgtcacccgtgaataaggtttgactagacagaatagtaatattgtcactaccagtagtaccagatttaaccacctcagcttgaggttgacctaaaccaggagctagatttagcggtttttccaacttcaacaaaatttgttcattgttatccactccagtccgaccaacagagaagggatagttgttgtcattggcaaccaaaatggtattcttgtcaagaaccagaacactctcaatggtttggaatgggaaaacaaaggtagttttaccatctccattgaggtcgttagggtccttaatgttcagtaggtctactacttcttcctttgtgacataaccattggtatctgctttggataaatcaaccttgtaaatccgcttaaataaagcagcagacccttgattattatcccgttcaatgactaggtactcattgtcattaatgactgttatatcaccaatggagttggctgtactctccagtttgtagtagagttttttgtcagtgtatttgcgagtagcaatgtcaaactcattaatccgcaaagcaccagcagcatcaccttgaaccgtcccctccaacagcatataaagcttagttttgctggcattaattgcgccaccctcaaagcccttagaaccacctagattagccacagccgttcctgccaatacatcaggattttggggagaacgaactatattatacaagggatcactaactagtttgtctctgacggtatctcctgtatcaggaaagtcagtgaagagtgcgtctacacctaattggaagaactgttggaactctagcttaggatcacccttgtaatctgcggctaaatactgtccctcattacggaaggtataaggatgaaccagcagacccgctttatgagcgtcttgaaccagggttgagggagctaatgttgttttatcagcatcattaactttaccgtctccattaacatcgtcagccttgccatcactattagcatcagtacctttaacactgacaatcatccgtttccaaggtccaatagcatcagcatatttagcaacattagctagaccttcggaagtccgtaaatcaccgtaagtaagagtgttattactaactttgaagtcataaggttgactttcaatgatcttgccattgatgtcaatatcctttgcatctaaaagttgcactaagggaatatttacacccgcagccggcatgatagtatcattcaattccttgaggttgctaacttcaaaagactggatgaaaatacggctaggatctgtaaaattatttgccttgagagtatctatgaggatctgacccagattgcggttaatcttggtagttgtacctacataggtagcttctgagagtgagtaggtgggatgcttggtttctgggtagataccaattttcttacctgtactagcttccactcccttaactaaggtaataatttccgtcagggtcggaatttcaaattgaccattaaaagactggtcacggaaggataggcgctcaattgcctttaattccttgatttccgctaaggtaaaatcttccgcaaaccaacctgtaactgatgttccatctaaaacaacggtctttttccggtctgcaaatttagcaatggtagcaacgttggtagttgtattaccagtatttaccgtaccatcagtattcaagattgctaaagcaggttcatgacgagcaatgagtacgccatcttttgtgacaactaaatcaggctcaataaagtcagcgcctttgtcaattgctaactggtaagcagctaaagtatgttcaggacga

SEQ ID NO: 1694 - DNA, 4000 bp, Escherichia coli
  misc_feature (1262)..(1262): n is a, c, g, or t
aagacgatctgattcatgtactgaaaaagccaataaaacgggtagtcagcaacccggttgaattgcagcgtatgacggaagaactttatcgactggcagcttctattgatatggctactactggcagtagttcatccagtatgggtatcagcaatcttgaacagatgctggaactgggggcgctaaaggatcccgaggccaatgatcaacatgtggttcgcatcgtcgactggcttctgcaatatgcttttgagcaaagggcaagtgatatacatattgaaccccgacgagaagtagggaatgttcgcttccgtatagacggagtactgtacacggtttaccagattcccatgcaggttatgaacgccgtaaccagccgcctgaaaattctggggcgaatgaatgttgctgataaacgcaagcctcaggatggtcgtctgaaaaccaagagcccggaaggcaatgaaattgagttgcgtctttccactttaccgacggcctttggtgaaaaaatggtaatgcggatttttgatccggatgtgctattacgttcctttgccgagttgggatttgatgatcaggatctggaaagctggcagaccatgatagccaggaaaaacggtattattcttatcactggtccgaccggtagcggaaaaacaacaagcctgtattccacgctcaagactctggccaccaaggaagtgaatgtctgcaccattgaagatccgattgaaatggttgaatccagtttcaatcaaatgcaggttcaggaaaatatcgacctgacctttgccggggggatcaaggcattactcaggcaggatcctgacattattatgattggtgagatcagggatctggagacagcggagatggctgttcaggcggcgcttaccggtcacctggttttatcatccttgcataccaatgatgctcctgctgccattacccgtttactggaactgggcgtgccttcctatctggtcagagcaacgctggtcggtgtggtagcccaacgcctggtcagaaccttgtgtccccattgcaaacaggaggcacagatcgatagcgagatctggaacgtgctggttaagccctggacagttcccatgcccaagaaggtttatcaacccgctggttgccaggaatgtcgggaaaccggcttcaagggcagacagggaatctatgaagtaatgcctttttcaccagctttacaggaatatgcagaagacaggggggatttaccccggctcaggttncatgcctataaagagggtatgcgcagtctcaggctcagcggtgcgctcaaggtggctgccggaataacaactgttaacgaggttctgcgtgtagctccggagagtcaataggcttgagtgccaaattgccagcaggcattgtggcgatgcccgaaagagatgtttttgccatgtttcttattataaaactgataaccgataaacccggacaagtgagtaagggcgcatgaagatccttattatcggtccttcctgggtaggcgacatggtgatggcgcaaagtctgttcatcagcctgaaacaaattgttcctgatgttgaaatacatgtgcttgctcctggctggtgcaaggctctgcttgatcatatgccgcaaatcagccgtgctattgaaatgactattggtcatggtgagctggccattggcaggcgcagggtattggccagttcactgaagcaggagaattatgaccaggcgatagtgcttcccaattccttcaagtccgcactcattccctggtttgccggcattcccgtcagaacaggttggcgtggtgaagccagaagctggttgcttaatgactgcagagtgctggacaagcaagcccatccgttgatggtggagcgttttattgctctggcttacccggatggaacggccttgccctctgaattgccgcgtcctgagcttgaagtaaaggcagactcccttgtgtcgctgttaaatacactcacactggatacccaaaagccggtgctgatactttgtccgggtgctgaatttggtgaggctaaaaaatggccggcatcaggttatgctgccgttgccagccactggttgtctcaagctggccaggtctggatcatgggttcggctaatgacagcaaggatgcggggaaaattatcaacgccttgccagagccagaccccgaacactgcattgatctgaccggtaaaactaccctgggggaagcgattgacctgatgtcctgtgctacccgtgtggtcagtaatgattccggtctgatgcatattgccgctgcactgaagcggccccaggttgtaatatacggatcaacttccccgacgtttactcctccacttgcagataaagtccagatagtttccctggaactggagtgtagcccttgtttcaagcgagtctgcccattgggacataccaactgtctgaaattacttgaacctgaccaggtcattcgctctttgcatgagctggattcaccatgaaagtcgcactggtattgtttaactggtttccccacggcggtttgcagcgtgactgcctgggtatcgccaacagcctgattaagcgaggacttgaagtagacgttatatgtatgagttgggaaggcagtgtgcccgagggcatcaatcgggtaattccctccttcaaagtaaaaaacaaagtggcggcaagaaaagcctttgccgaatttgtcttgcagataactgccgcggaagattacctgacggtgctcggctttaaccgtttgcccgggctggattactactttgccgccgatacctgttttgcctggaaggccactcgggaaagaggctggctttaccgaatggcaccgcgaagtcgccaatacctggcatttgaagaagcagtctttgggccacaaagtgagacaaaaatattaatgctctctccggggcagcaagacgagtacctggcctgttatcccaaggctggtaaacgcatgataaatattcctcccggtatcgaaagaaatcgtatggccggggaagatgcgacagcgctgaggcaatcgttgcgtcatgaatttggtataactgacgatcagttgctggtactgcaggtcggatcaggattccctgtaaaaggcgttgagcgctctctggcagcgctggcctcattgcccgaagcacctggaaaccagacaagattatttattattggtagagacgactctcagcgttatgaaaaaatagctgaaaaaatggggatagcagcaaatgtcaccttttttaaaagtcgtgatgatttgccgcgcttttatcagggggccgatctccttttacacccttcggtaaaggaaagtgccggcatggtgttaattgaggccatcgttgccggcttgccagtcctgacaacggcttcctgtggctatgcttttcatgtcaggcaggcgcaggcgggtgttgtcattactgagccattcagccagcaggcactaaatgaagcgctgaaaaaaatgctgaagagcaaagataaaagtcgttggcgcactaatggtatagcctacggacaaaaagagaatctctatgatatgccagatgcggtagcatcaatgctgttaaacgcaatcggggaggccaatgatggcaactgatgtctttatcagagaagacctgcagccacatctgccgaaggaaaatatctttgcgtttatcgccgggatggagggcgaagaattccgtgcgctggaatccaggcgaactattgctgtcgatctggatggcaaacgttattttgtcaaatatcatcgcggtaccgctactgcagaaattctgaagaacctcttacagttgcgcttgccggtggtgagtgcccgcaatgaatggcttgcgctttcccgcctcgatgttctgggcatcaacgttccgcaaatagccgcctatggaaagcgtggtctgctaccccagacatgcgaatcctttatcgttaccgatgatgtaggcactcagg

SEQ ID NO: 1695 - DNA, 4000 bp, Escherichia coli
  misc_feature (260)..(260): n is a, c, g, or t
  misc_feature (1198)..(1198): n is a, c, g, or t
  misc_feature (1623)..(1623): n is a, c, g, or t
  misc_feature (1646)..(1646): n is a, c, g, or t
  misc_feature (1651)..(1651): n is a, c, g, or t
  misc_feature (2114)..(2114): n is a, c, g, or t
  misc_feature (2716)..(2716): n is a, c, g, or t
  misc_feature (2767)..(2767): n is a, c, g, or t
  misc_feature (2773)..(2773): n is a, c, g, or t
  misc_feature (2971)..(2971): n is a, c, g, or t
  misc_feature (3577)..(3577): n is a, c, g, or t
  misc_feature (3784)..(3784): n is a, c, g, or t
  misc_feature (3952)..(3952): n is a, c, g, or t
ttgatacaactgattccacctgatcttctgataaactgccgtccttgttatcaccaagaagtctcgatagaaggaggatactatttaaaggagttctcagctcatgggacatattggccaggaattcagatttgtatttactgctctgttccagatcacgtgctctatcttcaatagtttttctggcagctttcaggtcctcattcttcctttctacatactctttctgttcctctatttcttcattggtttgacgtagntcttcttgttgagcctgcagtcttgattcagagtcttttaatgcaattgcattttcttcaagctcttcattgctttgacgaagagcctcttcacgtgcctgaagttcttctgcttgttgctgtgtctgttccagaaggatctcggtgctgtttctggatataaccgtattcaaggcaactgcaatgccctctgcaacctgagtcagaaaagttagatggatatcctggaattcgttaaaagagcctagttcaacaacactgcttactgcgttattcaatattagcgggaagatcaggatctgttttggtgtggcttctactatgcctgaattaatgttgatagaattgtcaggaaagtctgttaaaagaatatgtctcttttccaatgccgcctgacctaccagaccctcaccgggcataaattcattcggggtattcttctgctgaacataggcaaaactacctattggtttaagacgcttgtcatcaccagacatatatagtatcccaacctgtgcattcaaatattcagccagatgcccaatgatatttccacccaatgcttcaatgtcctgttcgcctcgcatttttacattcagttccatctggccagtcttgagccagttatgggtatcatttttttctgtcgtcaggcgtaagttagagatcatgtcattaaagctgtctgctagttctccgatttcacctctggtctttatctcaatattgtgatcaagttcgccttccgcaacacttctaactgcccttgaaagtgctgtgattggtttggttatacttcttgctacaaaaaagcataatataaacattgctattgcagagccgcctgtcaaaccggaatagatgataacagagattgttttttcagaggataaatctgttgcttctttaagaatttcctgaagttgtgcatcttcganttttttcaaatcgttaatgcgtcctgctgtgatggcaaagacgtattcaggtttcagtccaaaattgccactcgtaagattttcactgatttgcttgcgtatattcatgacagccttaatatttggctcactcatttttgtgtgatactcatttcgtattctttctgtaatctggtattcaaaaactgagagtaatgcttcctgccctttagatacccgcatccagtcatgcatttctgattgagtgacaggtttgtcttcagcaacaagacccgttataattgctctctccttgcccgccatctctttggccatgataaggttgatacaggccgtaaatggaaatgaaagttcagagtccttgataataacactcgcttcttgaaatgtccccagaatgtcatctattatttcatcatagaggncattggcttcattgttttcgatngacantgaagagatcttttctctgatagagggcagtttccagagttttcttgaggacgcattggctcgcctggcaaatttatagccaagctttgccatatccaatgtttttgtgtccttgtccatgactttataatacctgtctgtaagcagtctctgcttcttcattgtctcttccatgctgcttccactactggcaatgaatccggcagatgctccacgttctctctgtaattggtgaacaacctgactggaaactatcatataatctgcgatactcttgatctgctcagcctgtttttttgcatcaaattcacgaagcaatagaattgccatgaacccgcccactatcagggccgggatcaatgccaatacaatcagctgttttatcagtcctaatcctgaagattgtttagattctttctgctttgtgtgaagatcggagtttttcatttcaaattcctgtcgngttcaagtggaatagatttttgataatggttattagtgaaaacggtaaaatagtgatagctcttttcataattcagtcttttaactctaatttccaaatatctgaattttatgtctatagggttatcttaattttcggccattttggtgttttcttgatatggaaaattgaattgtagttttcaattaaatgcgggccatttgaagagattgttttgttggtatccagtccataagtacataaatcctgggaaatcgtaaccagctgaagcctgtaaactaaacttgattgttcgatcaccaagtagattgcccattgagccttcaaaaatttctgccagattaaatgctcttttgtattttataactttcgcttcgtttaaacctgttatgtccttggcgagagtgattgcgtcttcaatatagcccaattggtcgaccaatccattttccaatgcctgcactcctgtatatattctgccatctgacaactttctaacatcttccagttccatatttctaccagcggcaataatatttataaaccttgtatacatttcatctacaatgtcatacaagaccttcctttcagcgtcagacatntttttaagaggtgagccaatactcttcatatctcctgattttatcgaattntcctgnatgccgtatttctcagcaagattagcaatattgataagaggcatgattactccaatacttccggtaattgtcgtcggatgagaaattattttatctgcagcggctgaaatgtaataggcgccggatgccgcaacgtcctgcatgcagacgattactttcttatttgtttgttctttaaattccaggacttttttgtanataatatcgcttgctgttattcctccaccaggactgttgatttccaatatcacagcttttatcgcattgtcgtcccgtgcttgcttaagttgctgtttcacactatcaacaatgcttggtgtttcctggaaaagtttctttgatgattgcccggtaataacacccttcactggaattagaagtattttgtcagtaccgcttcctcctattactgtttcggaaagtttcttggtgctttcatcttcaacctgtgttgttagtgcgccctttactacgaagagtcccatgaacgaaatggataacacaatacagcaaagaaaaaagaatattgccaatgaagttgaaacccaaaaacctactctgctttttttcttattatcttccataatacgattttataaccgggtaaataatgtgttaacgtgatactaatatgtttctctgtttgttgattcctatgtagtcattaattcagaatccatgtatccccagtctccatagctctttctggtatacggcggatactcaattccaatgtagtcaagtgccttacctaccatgaaatctacctgatcgtttatagtctttggatggtagtagtatccnggcatagcaggtaagatacaggtttgcgcttttgacaacttcaacatgttttccagatgtattggagttaatggagtctctcgcggcatgacaaccaatttccttccctcctttagtgtaacacttgcagcacgttgaatgagatttgacgcaataccatttgctattgaacagagtgtgttcatactgcacggtgctataatcatngctttggtttttaatgtgccgcttgagatggatgctgcaatatctgatatgtggtgataggttatgctgtgactttccctatcaataaatttactgatattgaactcatttatatctaaggagagatttaattcactttctataacttgtatagcggcttctgacacnattaagtgaacagtatatgatttatcgctcagcgcttgtaagaggcgc

SEQ ID NO: 1696 - DNA, 4000 bp, Escherichia coli
  misc_feature (1)..(6): n is a, c, g, or t
  misc_feature (8)..(8): n is a, c, g, or t
  misc_feature (10)..(13): n is a, c, g, or t
  misc_feature (15)..(21): n is a, c, g, or t
  misc_feature (23)..(33): n is a, c, g, or t
  misc_feature (35)..(41): n is a, c, g, or t
  misc_feature (43)..(48): n is a, c, g, or t
  misc_feature (50)..(56): n is a, c, g, or t
  misc_feature (58)..(71): n is a, c, g, or t
  misc_feature (73)..(89): n is a, c, g, or t
  misc_feature (91)..(93): n is a, c, g, or t
  misc_feature (95)..(96): n is a, c, g, or t
  misc_feature (98)..(112): n is a, c, g, or t
  misc_feature (128)..(128): n is a, c, g, or t
  misc_feature (138)..(138): n is a, c, g, or t
  misc_feature (144)..(144): n is a, c, g, or t
  misc_feature (215)..(215): n is a, c, g, or t
  misc_feature (222)..(222): n is a, c, g, or t
  misc_feature (225)..(226): n is a, c, g, or t
  misc_feature (230)..(230): n is a, c, g, or t
  misc_feature (235)..(235): n is a, c, g, or t
  misc_feature (239)..(239): n is a, c, g, or t
  misc_feature (241)..(241): n is a, c, g, or t
  misc_feature (246)..(246): n is a, c, g, or t
  misc_feature (248)..(248): n is a, c, g, or t
  misc_feature (255)..(255): n is a, c, g, or t
  misc_feature (262)..(262): n is a, c, g, or t
  misc_feature (266)..(266): n is a, c, g, or t
  misc_feature (268)..(268): n is a, c, g, or t
  misc_feature (270)..(270): n is a, c, g, or t
  misc_feature (273)..(274): n is a, c, g, or t
  misc_feature (278)..(278): n is a, c, g, or t
  misc_feature (291)..(291): n is a, c, g, or t
  misc_feature (294)..(295): n is a, c, g, or t
  misc_feature (297)..(297): n is a, c, g, or t
  misc_feature (302)..(302): n is a, c, g, or t
  misc_feature (306)..(308): n is a, c, g, or t
  misc_feature (310)..(310): n is a, c, g, or t
  misc_feature (316)..(317): n is a, c, g, or t
  misc_feature (335)..(335): n is a, c, g, or t
  misc_feature (337)..(337): n is a, c, g, or t
  misc_feature (339)..(339): n is a, c, g, or t
  misc_feature (342)..(342): n is a, c, g, or t
  misc_feature (347)..(348): n is a, c, g, or t
  misc_feature (354)..(354): n is a, c, g, or t
  misc_feature (357)..(357): n is a, c, g, or t
  misc_feature (361)..(362): n is a, c, g, or t
  misc_feature (365)..(365): n is a, c, g, or t
  misc_feature (367)..(367): n is a, c, g, or t
  misc_feature (372)..(372): n is a, c, g, or t
  misc_feature (376)..(376): n is a, c, g, or t
  misc_feature (379)..(379): n is a, c, g, or t
  misc_feature (383)..(383): n is a, c, g, or t
  misc_feature (387)..(387): n is a, c, g, or t
  misc_feature (390)..(390): n is a, c, g, or t
  misc_feature (393)..(393): n is a, c, g, or t
  misc_feature (395)..(395): n is a, c, g, or t
  misc_feature (398)..(400): n is a, c, g, or t
  misc_feature (403)..(403): n is a, c, g, or t
  misc_feature (408)..(408): n is a, c, g, or t
  misc_feature (414)..(414): n is a, c, g, or t
  misc_feature (417)..(417): n is a, c, g, or t
  misc_feature (419)..(420): n is a, c, g, or t
  misc_feature (423)..(424): n is a, c, g, or t
  misc_feature (428)..(428): n is a, c, g, or t
  misc_feature (431)..(432): n is a, c, g, or t
  misc_feature (434)..(437): n is a, c, g, or t
  misc_feature (443)..(444): n is a, c, g, or t
  misc_feature (448)..(449): n is a, c, g, or t
  misc_feature (452)..(453): n is a, c, g, or t
  misc_feature (457)..(457): n is a, c, g, or t
  misc_feature (459)..(460): n is a, c, g, or t
  misc_feature (462)..(463): n is a, c, g, or t
  misc_feature (465)..(469): n is a, c, g, or t
  misc_feature (471)..(473): n is a, c, g, or t
  misc_feature (475)..(475): n is a, c, g, or t
  misc_feature (477)..(477): n is a, c, g, or t
  misc_feature (479)..(481): n is a, c, g, or t
  misc_feature (483)..(483): n is a, c, g, or t
  misc_feature (486)..(494): n is a, c, g, or t
  misc_feature (496)..(497): n is a, c, g, or t
  misc_feature (500)..(502): n is a, c, g, or t
  misc_feature (508)..(514): n is a, c, g, or t
  misc_feature (516)..(516): n is a, c, g, or t
  misc_feature (518)..(519): n is a, c, g, or t
  misc_feature (523)..(527): n is a, c, g, or t
  misc_feature (529)..(529): n is a, c, g, or t
  misc_feature (532)..(535): n is a, c, g, or t
  misc_feature (537)..(539): n is a, c, g, or t
  misc_feature (541)..(543): n is a, c, g, or t
  misc_feature (545)..(545): n is a, c, g, or t
  misc_feature (548)..(550): n is a, c, g, or t
  misc_feature (552)..(553): n is a, c, g, or t
  misc_feature (555)..(557): n is a, c, g, or t
  misc_feature (559)..(560): n is a, c, g, or t
  misc_feature (562)..(566): n is a, c, g, or t
  misc_feature (568)..(569): n is a, c, g, or t
  misc_feature (572)..(579): n is a, c, g, or t
  misc_feature (582)..(585): n is a, c, g, or t
  misc_feature (588)..(590): n is a, c, g, or t
  misc_feature (592)..(600): n is a, c, g, or t
  misc_feature (602)..(604): n is a, c, g, or t
  misc_feature (608)..(611): n is a, c, g, or t
  misc_feature (613)..(614): n is a, c, g, or t
  misc_feature (616)..(626): n is a, c, g, or t
  misc_feature (629)..(634): n is a, c, g, or t
  misc_feature (636)..(636): n is a, c, g, or t
  misc_feature (638)..(638): n is a, c, g, or t
  misc_feature (640)..(641): n is a, c, g, or t
  misc_feature (643)..(643): n is a, c, g, or t
  misc_feature (645)..(649): n is a, c, g, or t
  misc_feature (651)..(658): n is a, c, g, or t
  misc_feature (660)..(667): n is a, c, g, or t
  misc_feature (669)..(669): n is a, c, g, or t
  misc_feature (671)..(671): n is a, c, g, or t
  misc_feature (673)..(673): n is a, c, g, or t
  misc_feature (675)..(675): n is a, c, g, or t
  misc_feature (677)..(678): n is a, c, g, or t
  misc_feature (680)..(683): n is a, c, g, or t
  misc_feature (686)..(696): n is a, c, g, or t
  misc_feature (698)..(705): n is a, c, g, or t
  misc_feature (707)..(707): n is a, c, g, or t
  misc_feature (709)..(709): n is a, c, g, or t
  misc_feature (711)..(712): n is a, c, g, or t
  misc_feature (714)..(716): n is a, c, g, or t
  misc_feature (719)..(726): n is a, c, g, or t
  misc_feature (728)..(731): n is a, c, g, or t
  misc_feature (733)..(735): n is a, c, g, or t
  misc_feature (738)..(738): n is a, c, g, or t
  misc_feature (740)..(741): n is a, c, g, or t
  misc_feature (743)..(746): n is a, c, g, or t
  misc_feature (748)..(752): n is a, c, g, or t
  misc_feature (754)..(760): n is a, c, g, or t
  misc_feature (762)..(762): n is a, c, g, or t
  misc_feature (764)..(764): n is a, c, g, or t
  misc_feature (766)..(766): n is a, c, g, or t
  misc_feature (768)..(770): n is a, c, g, or t
  misc_feature (772)..(772): n is a, c, g, or t
  misc_feature (775)..(777): n is a, c, g, or t
  misc_feature (781)..(782): n is a, c, g, or t
  misc_feature (785)..(785): n is a, c, g, or t
  misc_feature (789)..(791): n is a, c, g, or t
  misc_feature (793)..(794): n is a, c, g, or t
  misc_feature (796)..(798): n is a, c, g, or t
  misc_feature (804)..(806): n is a, c, g, or t
  misc_feature (808)..(808): n is a, c, g, or t
  misc_feature (811)..(811): n is a, c, g, or t
  misc_feature (813)..(813): n is a, c, g, or t
  misc_feature (815)..(818): n is a, c, g, or t
  misc_feature (823)..(825): n is a, c, g, or t
  misc_feature (829)..(830): n is a, c, g, or t
  misc_feature (833)..(834): n is a, c, g, or t
  misc_feature (836)..(836): n is a, c, g, or t
  misc_feature (839)..(839): n is a, c, g, or t
  misc_feature (842)..(848): n is a, c, g, or t
  misc_feature (850)..(850): n is a, c, g, or t
  misc_feature (852)..(857): n is a, c, g, or t
  misc_feature (859)..(859): n is a, c, g, or t
  misc_feature (861)..(861): n is a, c, g, or t
  misc_feature (866)..(866): n is a, c, g, or t
  misc_feature (868)..(869): n is a, c, g, or t
  misc_feature (871)..(874): n is a, c, g, or t
  misc_feature (876)..(879): n is a, c, g, or t
  misc_feature (881)..(881): n is a, c, g, or t
  misc_feature (884)..(886): n is a, c, g, or t
  misc_feature (888)..(892): n is a, c, g, or t
  misc_feature (895)..(895): n is a, c, g, or t
  misc_feature (899)..(901): n is a, c, g, or t
  misc_feature (905)..(905): n is a, c, g, or t
  misc_feature (908)..(909): n is a, c, g, or t
  misc_feature (911)..(916): n is a, c, g, or t
  misc_feature (918)..(918): n is a, c, g, or t
  misc_feature (920)..(920): n is a, c, g, or t
  misc_feature (922)..(923): n is a, c, g, or t
  misc_feature (926)..(927): n is a, c, g, or t
  misc_feature (930)..(932): n is a, c, g, or t
  misc_feature (934)..(937): n is a, c, g, or t
  misc_feature (939)..(942): n is a, c, g, or t
  misc_feature (945)..(945): n is a, c, g, or t
  misc_feature (947)..(954): n is a, c, g, or t
  misc_feature (956)..(960): n is a, c, g, or t
  misc_feature (962)..(964): n is a, c, g, or t
  misc_feature (967)..(968): n is a, c, g, or t
  misc_feature (970)..(970): n is a, c, g, or t
  misc_feature (972)..(973): n is a, c, g, or t
  misc_feature (976)..(976): n is a, c, g, or t
  misc_feature (978)..(978): n is a, c, g, or t
  misc_feature (980)..(984): n is a, c, g, or t
  misc_feature (986)..(986): n is a, c, g, or t
  misc_feature (988)..(988): n is a, c, g, or t
  misc_feature (990)..(991): n is a, c, g, or t
  misc_feature (993)..(997): n is a, c, g, or t
  misc_feature (1000)..(1002): n is a, c, g, or t
  misc_feature (1004)..(1004): n is a, c, g, or t
  misc_feature (1006)..(1006): n is a, c, g, or t
  misc_feature (1008)..(1010): n is a, c, g, or t
  misc_feature (1012)..(1012): n is a, c, g, or t
  misc_feature (1015)..(1017): n is a, c, g, or t
  misc_feature (1019)..(1019): n is a, c, g, or t
  misc_feature (1021)..(1028): n is a, c, g, or t
  misc_feature (1032)..(1036): n is a, c, g, or t
  misc_feature (1040)..(1040): n is a, c, g, or t
  misc_feature (1043)..(1043): n is a, c, g, or t
  misc_feature (1045)..(1045): n is a, c, g, or t
  misc_feature (1049)..(1050): n is a, c, g, or t
  misc_feature (1052)..(1052): n is a, c, g, or t
  misc_feature (1054)..(1058): n is a, c, g, or t
  misc_feature (1065)..(1072): n is a, c, g, or t
  misc_feature (1076)..(1076): n is a, c, g, or t
  misc_feature (1079)..(1080): n is a, c, g, or t
  misc_feature (1086)..(1086): n is a, c, g, or t
  misc_feature (1088)..(1088): n is a, c, g, or t
  misc_feature (1090)..(1092): n is a, c, g, or t
  misc_feature (1094)..(1095): n is a, c, g, or t
  misc_feature (1097)..(1102): n is a, c, g, or t
  misc_feature (1104)..(1105): n is a, c, g, or t
  misc_feature (1109)..(1109): n is a, c, g, or t
  misc_feature (1117)..(1117): n is a, c, g, or t
  misc_feature (1133)..(1133): n is a, c, g, or t
  misc_feature (1180)..(1180): n is a, c, g, or t
  misc_feature (1187)..(1187): n is a, c, g, or t
  misc_feature (1450)..(1450): n is a, c, g, or t
  misc_feature (1689)..(1689): n is a, c, g, or t
  misc_feature (2501)..(2501): n is a, c, g, or t
  misc_feature (2917)..(2917): n is a, c, g, or t
  misc_feature (3144)..(3144): n is a, c, g, or t
  misc_feature (3461)..(3461): n is a, c, g, or t
  misc_feature (3777)..(3777): n is a, c, g, or t
nnnnnngncnnnnannnnnnngnnnnnnnnnnnannnnnnncnnnnnncnnnnnnncnnnnnnnnnnnnnngnnnnnnnnnnnnnnnnncnnncnnannnnnnnnnnnnnnncctaaacctcttcaanaggtatttgntatttngcatagggtaagaaccaatgctcgcagctctccaagacatctttaagaagaaccatagacattaaatcttntcgtccnttnngtcnatatncttnanagagncnctcatcnactcggntaancntntcnnttangtcgcatttttcnttnncnaggtngtannngncgatgnnttttacatggaggaaaanancnccnaaatnnaaagcnacncacnnggnantgccntttncantgcnccanccngtntntcnnnggncattnaagaantcnannagnntttngcnntnnnnggtggnntttnntanncctntnnanncnnnnntnnnancntnnntnatnnnnnnnnnannacnnntgtctnnnnnnntngnngctnnnnngnttnnnnannnannngntannnannannngnnannnnncnntgnnnnnnnntcnnnnagnnntnnnnnnnnngnnncatnnnnannannnnnnnnnnnccnnnnnntntntnncntnnnnngnnnnnnnnannnnnnnngntnancntnncnnnnaannnnnnnnnnncnnnnnnnngntngnngnnntcnnnnnnnntnnnntnnnggnannannnncnnnnntnnnnnnntncncncnnngnagnnncctnntcnttgnnncnncnnntctttnnncnganantnnnnaactnnnggannatnntnccntcnnnnnnngngnnnnnnantnctttnanntnnnnannnncnccnnntnnnnnganatcnnnatgnccnntnnnnnntntntnngtnnctnnntnnnntnnnnaancnnnnnnnnannnnnannngtnntncnnctntntnnnnncntntnntnnnnnttnnntntnannnanatnnntngnnnnnnnnaaannnnncttnttntntganntnannnnnttattannnnnnnntttnttnncttcgnangnnnannannnnnnanncttnatttgtcnttaacaaattgccccncgaccatcttaccagtcctgtctttgatctcatcgtaagccaactgnaaacaanaagtgctctcaagatcaaccatttcagctgcaataataatggtcaccaacatatctccgataccatcggccacctcattctctaatgcttctattgttttggcgtgaacatgactaggctcgcgatccatcgcttgatgccagtctcgtagattttttacagcaagaattgtttcttcaagttcttcctgtgttttgtctaactgagctaaagtatctccattatcaaagatacctcggtcttttgcccaaccgattaccttnctttctaattcggaaaaattattcatcttcttcaagtccttcgaatagtttctttttttctcgttcgtattcttctagagcgtgatcctctgcggtcattttgaaatcgccaaacgtagacgttgacccatctaagccaaatatttttttaatttgtttgttgtcaactacaggcatctccgaaacatcaagagagtcatcaactaaaactttcttaggggcgatttcctgtaattcgncacacatagagaagatttctcttttgcttattagctcgccgctcaatgacatgcgcctcaacttgtcaacttctttgcaaaaattaatataatccaactcttggacaatccgcttctttaaatgactatcataaataaaggcatcaaacgcctcataacgttcattaagcaaataattttcatcaagggaaacctcaacgggatggtaaccagactcccccaaaacatacctgaggacatcttgtttgcggacttgaatcgcttgttctttcatcaacgcccacaatagagagttttccccccgtgtcaacaaaaatctacagaattcttattctgcttctaatcttagaaacatgtctgtttttttctaagactgagccgccctctcggctccctgctccattagtattaccctcaatggttttcacatagccccttgaatctacgtctgcgatagcgatagcgatatgagaaaaagtaaaaactataatgtctccagcattaatgtcctcgttggtgggtttgcgaagccccactccattcgcggcttgttgtttagcccagttttcaaagtcccatgcccccgctgttctgggtcttgagaatttcacatcctcaccctctatagcctcccttacaagccagcagatgaaagccgcgcaccaaggccatcctttatcggcgtcgagccatgtcgccgccttgtattcgtctaccttggggccacaattagttccatctacctcggaaacaccaatctctccacgggccaacgataccatcttctcgggtatgctgctcccagaaatcgngggttccttggtggataatttggccagtatagcgttccaagttactggaccgtctgctccatcactagaaacacccaaaagtctttggacggcctttactacctctcttttacctttaaaattcattatttaaatttctttttaaggaattttaacgggcgcttttcaaactttttggccaaacaaacaattcctccgattacttctggacttactgcaccaattataccatacgttattgccttcataagggatgaaacctctgtttgttctaggacaaaccaagcaattcctgcggcaattgcagcggttgcaatctttttaaactgctccttaacagtaaggtggttagtgccagtcagaagcctagcaaacatagcagcagccccgattaaaggaacaagccaccccccacnaagaaactcttttattatagacttttcgggttccatgttaaactaattacactttctacgaaaaaagccccccattagggggactttttatttcgtttttaaaagatttatcttagaacctgaaagaaacccctccaccaaccgaccaatcatgctctaaagcataagcactagaagaatcaagatcattgtcatgataagccgccttcacaaagagagagagactntcattaagctcataggtggctgcgaccccagcttctaccccatcatactcgtcagcaatattaactgccgcaaatggagtaatagtaagattcgccacgggagtagcgaaatcgcgagaaaccatcacttccaccccataagggccagacgaatcagcttcgtgccacacggtagccgtgaggtcagcaatatcgtgggcataagttagcgcaagaccaacctcttcccaacccccattagaggaatcaatcctcttgagatgcgctctagcgcccaagctctgaccaaaaatctcaattggacgagcataagcaanagaccaatctttctctgtatcgccatcaacatcgtgaaggtcaatacccacagaaagatgcgctccctcaacgggaattcccacaagggcagaaaaagcaagagaatcttctcttgtggctacgccacgatgagtcgataaattgctatagttaacgccaagctcaggagaaacactctccaagagattagtgatagtaacacctgcgttaccaagggtaacgcccaacatggttgcaagactaaataatagtgtcttcatatttttgtattattaacggtttaaagcgattgtcaaattaattttacacattctntgtcataaaagagaatataagggcttatttttattatctacatgtgaatacgtattcatcgctgtcgctattttttccccaccttttttattaatctccaaacttgatatcggtctttatcttttcccattgctgcctcaatggctctcctcgtaatgcttttatcagaagcggtgaaggtcacctcttggaaacgaggcttgtcacttttaataatgtttat

SEQ ID NO: 1697 - DNA, 4000 bp, Escherichia coli
  misc_feature (1)..(2): n is a, c, g, or t
  misc_feature (6)..(7): n is a, c, g, or t
  misc_feature (10)..(11): n is a, c, g, or t
  misc_feature (16)..(17): n is a, c, g, or t
  misc_feature (20)..(22): n is a, c, g, or t
  misc_feature (24)..(24): n is a, c, g, or t
  misc_feature (26)..(26): n is a, c, g, or t
  misc_feature (29)..(29): n is a, c, g, or t
  misc_feature (31)..(32): n is a, c, g, or t
  misc_feature (34)..(38): n is a, c, g, or t
  misc_feature (44)..(44): n is a, c, g, or t
  misc_feature (47)..(47): n is a, c, g, or t
  misc_feature (50)..(52): n is a, c, g, or t
  misc_feature (54)..(56): n is a, c, g, or t
  misc_feature (59)..(63): n is a, c, g, or t
  misc_feature (65)..(68): n is a, c, g, or t
  misc_feature (70)..(70): n is a, c, g, or t
  misc_feature (72)..(74): n is a, c, g, or t
  misc_feature (76)..(78): n is a, c, g, or t
  misc_feature (80)..(80): n is a, c, g, or t
  misc_feature (82)..(82): n is a, c, g, or t
  misc_feature (85)..(86): n is a, c, g, or t
  misc_feature (94)..(94): n is a, c, g, or t
  misc_feature (97)..(97): n is a, c, g, or t
  misc_feature (101)..(102): n is a, c, g, or t
  misc_feature (106)..(106): n is a, c, g, or t
  misc_feature (113)..(113): n is a, c, g, or t
  misc_feature (115)..(116): n is a, c, g, or t
  misc_feature (120)..(120): n is a, c, g, or t
  misc_feature (125)..(126): n is a, c, g, or t
  misc_feature (128)..(130): n is a, c, g, or t
  misc_feature (137)..(137): n is a, c, g, or t
  misc_feature (140)..(140): n is a, c, g, or t
  misc_feature (144)..(144): n is a, c, g, or t
  misc_feature (146)..(148): n is a, c, g, or t
  misc_feature (151)..(151): n is a, c, g, or t
  misc_feature (156)..(156): n is a, c, g, or t
  misc_feature (160)..(160): n is a, c, g, or t
  misc_feature (567)..(567): n is a, c, g, or t
  misc_feature (619)..(619): n is a, c, g, or t
  misc_feature (726)..(726): n is a, c, g, or t
  misc_feature (1152)..(1152): n is a, c, g, or t
  misc_feature (1257)..(1257): n is a, c, g, or t
  misc_feature (1351)..(1351): n is a, c, g, or t
  misc_feature (1477)..(1477): n is a, c, g, or t
  misc_feature (1497)..(1497): n is a, c, g, or t
  misc_feature (1986)..(1987): n is a, c, g, or t
  misc_feature (2058)..(2058): n is a, c, g, or t
  misc_feature (2563)..(2563): n is a, c, g, or t
  misc_feature (2590)..(2590): n is a, c, g, or t
  misc_feature (3073)..(3073): n is a, c, g, or t
  misc_feature (3097)..(3097): n is a, c, g, or t
  misc_feature (3366)..(3366): n is a, c, g, or t
  misc_feature (3558)..(3558): n is a, c, g, or t
  misc_feature (3583)..(3583): n is a, c, g, or t
  misc_feature (3586)..(3586): n is a, c, g, or t
  misc_feature (3616)..(3616): n is a, c, g, or t
  misc_feature (3628)..(3628): n is a, c, g, or t
  misc_feature (3631)..(3631): n is a, c, g, or t
  misc_feature (3640)..(3640): n is a, c, g, or t
  misc_feature (3691)..(3691): n is a, c, g, or t
  misc_feature (3739)..(3739): n is a, c, g, or t
  misc_feature (3795)..(3795): n is a, c, g, or t
  misc_feature (3817)..(3817): n is a, c, g, or t
  misc_feature (3829)..(3829): n is a, c, g, or t
  misc_feature (3838)..(3838): n is a, c, g, or t
  misc_feature (3880)..(3880): n is a, c, g, or t
  misc_feature (3904)..(3904): n is a, c, g, or t
  misc_feature (3964)..(3964): n is a, c, g, or t
  misc_feature (3979)..(3979): n is a, c, g, or t
  misc_feature (3991)..(3991): n is a, c, g, or t
nnaagnngcnncagannttnnngnanaantnntnnnnnaaactnaanaannngnnnaannnnntnnnntnannnannntngnttnnaaaaaggnttngaanncgtnaaataantnnttanttaannannnagaactnatnagangnnnccnttcgngggngcctcttttgtatataatatagttaactatatgtggaatttattttattgtatcttaaattaatgcggtcatttcttgaatagctagttcctgaattactaatgctttcacaataggtaatatactaggaatttggtataatattaaatagttgtgcatatactactaggtatattgtactgatatatgatttgataactttaatagtaaacatagaggtgcttatggctaaggataatcaacagatcgcaacagacgatatgcaacaaacaatatataaagagttaggctataaatcctatccatttccttttactacacctgcctatttggaagcgtatggtacacttgtaggtcttaagccaccaacggctaaaacagcacgtgtacttgaattaggtgctacntatgggggaaatattatttctcaagctgtgcataatccagaagcaacatttntaggtattgagctttcccaagatcaagtagagaagggcaacaaaattattagtgatgccaagttagataatgtatctctattgcaaggggatattttgaactttgangaatccttaggaaactttgattatattattgcccatggtttttactcttggattagcgatgaaatgaaggataagttgcttgatattatatcccatcatttggctgataatggcattgcatatgtatcctataatacatacccaggttggcatacgatggaagaggttcgtcaacttatgctatttgctaatcgtggttatgatgagttgactcataaggaaaaggtattacgcggtaaaactgtaggtagtctagtaggtgctcaaattcttaattatgataaccttaaagagcgtaatagtaaattcttaggtgccttgcgttccgttatgcaaaaggatgattattatgtaggtcatgaccatttagaacctcataatgatccatgttacttctatcaattcaatgatcatttaaaagctcanaatcttagctatgtatgtgatgcagatttaacattatccatggttcgtacctatgatgaaagcatcgccgataaacttgaaaaattggctcctaatagccaagcngatcaagaacaatatttagactttatgcttgatacaacattccgcaagtctattatttgcaaagaaagtgctgcaaaggatattagctatgatntagctaatccagataaggtgaatacagtacctgtacggtctatcgtaaatagttttgtattccaaatcctctttgatgaagaagcattaaaaatgtttgaaaatgagcttgtacgagatacattcnaagcgctcattaaagatggnggcactttcaatatgatcgaagcccttgccattttaaaagctgctcatgatactgctaatgcatctgaagatgacttagaaccagctgtatgtagtttatataaagctatcgttgaacatatggtacgcggtggtattcgattctataaaacattccctgataaacaggaatatatggagggcttatcctatgtaccagctcgttttacaaactttgtaaaagctattgctgatggtggtagtgaatatatttatggtgcaaatatgttcaatgacgctattggtgatatttctgaagaagatttattgttcatggaattattgaataagcctaaagccaagtctacgatgattaagaagattaaagattctctctttagcgctgataaggcccaaactggtaaacaccaaaatgccatggcggaagcattctataatgaattgacgaagcgtatggagcaattaggctttattagaagtaagaaaaannatggtctttcgtaattcttttaaaatttctaagataatattttggtgattcatataatcttcagaataaanataaaacccattatacttataacatttatgtgtattaagtagtaatgggtttttgttttatataatttaatttaatcttttttaataattattacatttagttatttaatattgccaaaaaagtatagtaaatcgataaaattaatgagaaataaatgaaccatatatgaaaagtgtggtatactatgtatgggtatttttgtgaacatcatccgatgtgttgtggatgatattataaattgtattagttacaatgttgtttttattgtattatttgtaaaaggagtcttttatggcatctaagaaggccgttctagtatatatactagaaatcctgaaaagtgaaacggatgctaatcatactttatctcaagaggagattcgcagtatattagccgagcggtacgaggtatccgtcgatcggaagaccttaggccgtcatttaaatgatttatatgaatctggtgattttggtattcaatgtgaagagtctgccgtaggagcngatggtactattcgccgtactgatttntatatgattcatacctttgaagattcagaattgagattattaattgacggtattttggcgtctcgtcatattaccgcatctcaacgtaaggatttaattagtcgtgttgctaaattgggtagctctcatttcaagccccatggtattgatattgaaagtgctacgggttaccttcatagaagtcaggacttattccttaacattgatctcatagaggaagcaatacaaaaggggagaaaaatttccttggcttattgccaacctgacgtggataaacgattacatatcaatctcggtccagataataaggagcgaaagtatgtattcaatccattccaactagttatgaatcggggacactattacctagttgggaaccatgaaaattatgatgacatgtctacattgcgtgtcgatcgaattgcacacattacggtgctgagcgaacgtagaaaacctttacgggagataaagggctataancagcaacgcacctttaatgtatcncaatatgtaaaagaacatatttacatgttcggcggtgaatccgttaccgtaagttttaaggcaaagcggtctattgtaaaccaaattttagattggttcgatggcaatgtggaattcaccaacgtcacatctgatgatgttgtatgccgtgtacgtgtaaatcatgatgcctttaagtattgggcacttcaatatatgcaaagtgtgaaagtactttcaccagcatccttggtagcagaagtgaaagaagctattaaggaaggcttagnacaatactcataataaaagagctagttgatcgttgaatcaactagctctatttttatgtatgctattttaaacgtccgatttctaatttatagaacatgcattttttctgcttcgcgatagtccttaagaactggacgaggaggtaatttacccatgatactcactacatagatagcgatggaagagaagangaagcctggcacgatttcgtaaagnccnaggaatccaaattgtttccaaatgagtacngttaaaccaccnacnacgataccngcgatacagccatgacgtgtcatacgtttccagaataaggagaacaagatngctggaccaaaggcagcaccaaaacctgcccatgcataggcaaccatngttaagatgtagctatctggatccattgccatatagatggctattaatgcaactantagtactacgatacgacttacnagtactagctcnttatcactngctttaggatgaatgatattcgcatagaagtcattagaaatngcagaggctgttactaataactgngcagatgcggtactcatgatagctgcgagtactgcagaccagatgagacctgctacaaanggtgtaaagagacgntctgtcatgatnaggaataca

SEQ ID NO: 1698 - DNA, 4000 bp, Escherichia coli
  misc_feature (1987)..(1987): n is a, c, g, or t
  misc_feature (1989)..(1990): n is a, c, g, or t
  misc_feature (1992)..(1992): n is a, c, g, or t
  misc_feature (1996)..(1996): n is a, c, g, or t
gacggggttacccaaaccatcaccatgggctcttacggcatcggcgtaggccgggccatggcggcggccgccgaaacccaccacgacgaaaatgggttgcaatggcccatggccatcgccccttacgaggtggtgattaccgtggtaaaaaccgaccacgaagagtccatggctgccgcagaaagcgcctacgccgagttccaggccgcaggcgtagacgtcttgttggatgaccgccctggccgacctggtgtcaagttcgccgatgctgaactcattggtatcccgttgcgcctcaccgtgggtcctcgcggcttagaaaacaatcaactcgagttcaccgatcgtcgagacggtacgaagtctgacttggttcttgaccaagccacccagcacataattgatctggttaaccaaggccgacgtttaggcgcctgaccttcgctgccatccgctagattcttttccgaccgacccctgccgaggttttacatgactaaaacaatcgaccgccaactccccttgaaacgccgccaaaaagtagtggcctcgcttgacctccccggtgttcccgaaggaaccgaaggccaagtcaaggtagctaatggcatcacttggtaccgctattgggttgactttgctaacggcatcaccttggggtcagtaagccacgaacaactggcacaaaaaaatgattggccgcaatttaaaatcgaccgcgagaacgatactttgaacgcggaaatcaaagccggtgaagaagcggcaacagaaacagccagcgatggtgcagccagtgggaatacctctggtgtgcctgaacatcttttagaacgcagccgggccgctcgtgctcgcctcggcgcttaacactctttagcgtccggactgtccccatttggggtatcctcagacgttcctgcaatgctcacggaggctcccgttgacctttaaacctggcgacaaggtcgtctacccgcaccatggtgcggcgattatcgacaaagtacagaagcgtaaagcttttggcaaaaatactgaatactttattttgactatggcccacggcgatatgaccctttcggtgccggttgacatggtcgaagaggtcggtatgcgctggcccatcagtaaagaagacgtggtcgatctctttgatgtactacaaaaacgcgatattcgtgaaccttccaactggtcacgccgttttaaaaaccatcaagaaaaacttaaaagtggcgacgtctatcaagtagccgaagtggtacgaaacttggctttgcgtgatgccgctaaaggactttcggccggcgaaaaaactttgtacaccaaagccctaagcgtgcttgtttctgaattggcttttgcccttgacgtagaagaagacgaagcgagcgccaaggtcgcagacgctctttcctaattgcctcttggtgaatggttcgctctgtattacgctcaaggtgaaccaacaattagcaaagggatgacatgaccaagcgtcgcatagtggtaggtgttgagggttcagggtatgcccgggccgctttaatctgggcttttgaagaagctgcgctgcgtgactccattgttgaggtggtgacggcctatgccccaacctatgtgcccgctgcgccagatttaggttatgtgccgcttgattcttacgacctcattaatgaggtcgaacgcatgcaaggtgaagttatagattctgcgcttgaagccgctggtcatcccgaggttgaaattgtgcggacgctaaccaaaggccgagcggccgacacgcttttgcaggccgctaaagacgctgaccttttagtagtcggcaatcggggtcgcggcggttttgccgggcttcgcctagggtcggtaagccaatctattgcccatcacagcccttgcccattggtgattattcatacgggtttagacaacgaggactgaattatttctgttccgggggctctgggcggtcagagccganannancttnttgacgcttttgaaagcacatcctttgatttggtgatcattggtggcggcatcaccggtgccggggtggctcgggcggctagccaacgtggtttatcggtggcattactggaggctaaagatttctcttcgggtacttcttctaagtcttctaaacttattcatggcggtctgcgctatttagcaatgggccattttcgggtggtgcgccacacggcacgtgaacgggcggtggttcatgctttagctccccatctttgtgaaccgcactggatggtttttccggtggcttcccggcgctggctagtgcttatggatgtcgtggtccggatttacgaaatgttgggcggggttaagcgctccgatcgccatcgtcgttggggtcgagccgaagtggcacaaaacgagcccgctttacgagcagaaaaaagtcgttacgccgtaacttttcgcgagtatctgaccgatgactgccgcttggttctggccaatttgcgtgatgcggtggcttctggtgcccaagtcgctaattacctttctgtcgatggcctgctgggcgaaaaccaggcagaaggggttactgctcagtgtgcgcttaccggccggtcgattcaggtaaaagccgcggtggtagttaacgccaccggcccgtgggttgatgccacccgccaactggaagccgatgttgagcctcgtttggtactcagtcgcggcattcacgtggctgtccggcgcaccgatttaccggtcaacaacttggtgaccatgaccggttcagatggccggccggtgttcgccctgccgcgaggaccggttacgtatttgggaactaccgatactcgtcatctcgaaccagcaacccaccatccatcggttgaacagattgatgtggattttttgttaactaccgttgaggatcatttcgatatttctttgaccccaaagcaagtgaccggggcatgggctggcctacggccgttgatctctaaaccggagcaaaccacttcggaactttctcgcaaagacgaagtatgggtcggcccccgaggggttgtcacggtggccggtggcaaacttaccggttacctccaaatggccgacgatgtccttgagtctgtagatactcaactctctgcccagcagagcttgaactccagtgccgtctttagtgggacaacttctacctctaagaccttgcccggtggagacattgcttcagacttgtctttggctgcgcaaactttagcagccgaccatgaccttgctttgcccattgccgagcgtttggtgcgacgctacgggtcggaaaccgaagcggttattaccctcggaaaagaaccggtggcccccggggcgcatcttttgtcgggtgaaatcgtgtgggcggtgcaagtggatggtgcgctctttttagacgatgtgttggtgcgacgcaccggaagcatgtggtttgatccagaggttggggttttgattgaaccggtagctgagcagttagctggtttgcttggttggacttctgagcaaacatctgagcaaatttctctgctagaaagacagcaagaaaccgatttaacatttatttaggggagtccaatgactgaagtagtagcggttgattcaccggtgggcttactttgggtagcccacgacgagggaactattgtggccagcacgttggctgggtcaacgcactcccctacttttgcaccgtatcttgatttgcccctagccaagaaagcaccggctgggctggttaacgccattgctcaagcgtttacccacaaaggggcaagcgacttgccttttgatcagcgcctcggcaccgattttcagcgcttggtgtggaaaaactgtactttgatcccatctggagaaacccgcacttatcaagagttggcgcaagccctgggtcgccccaaagccacgcgtgcggtgggtactgcgctcggagcgaacccctttcttgttttggttccctgccaccgagtgttgcgagccgatg

SEQ ID NO: 1699 - DNA, 4000 bp, Escherichia coli
  misc_feature (1968)..(1968): n is a, c, g, or t
  misc_feature (1980)..(1980): n is a, c, g, or t
  misc_feature (1984)..(1984): n is a, c, g, or t
  misc_feature (1986)..(1986): n is a, c, g, or t
  misc_feature (1991)..(1991): n is a, c, g, or t
cgactgtcgagatcgctcatcagcagcgcgaattcgtcaaagtccatggattgcgagccatcaacgtctatcgcggcgaagagctcgcgggcgactcgcatcgacgccgcgtctcgaccgccaatcatctgccacgtcgtgacgaactctgagaattcaacctcaccgccaccgtcggcgtcgagcgcatcgaaaagttcacgaagttgcgcacgtttacgttcgccgagcgtctttttcatgagtttgcgccgtttgagcatccacgccgcggtttgcgccttgagctcgcgtcgtcgaaacgacgcgcaggcgtctgcgcgagacgcgtcacggcgacacgcgtcgatcgagcgcaagtccgagcgaagccgggtgattacatcgagtacattcgatgctttgtcgtcgacgagcgcgagttcgcgatccatgcggtgttgtggggaagagtcaaagaatgaggcgactggcgctaaaaatggctattcgaattcttcgggcaaagaaaaaatgaaacgcgcgtgcgatcggcgggacgctttgccctaggacacgcgaaactcgtgccatcgggtccgtgcccgtcgcgatcgcgtgggtcgagctcgtccacggtgataaattcgtcatcgagtcggcgcgtcaactcggcgcccacgaagagctccacgagcgtcgaatctccatccgcctcggcgtcttcctcttcgtacgcctcgagccaatccaagcgcacgagcgccgagttcttctcagcgtaagcgcgaagaaatgattcgtcattcgcgaagacgagcgccgaaagagaaacttcgtcgatggacggcgcgctttcgagaacgcccgcgctgagaggcgaatcgagcgcgcggtcgagctcggcttcagattttcctgcgtcttcatatatcgctcccgtggtcacgcgagcgactgtttccatgagccacatcacatcctgaacgtcttggtgcgactgcgcgagcgacatcggccacggcgtcgacgcttcccgccacgccgggatgacgacgtacggcagcgcgcatcgatccgccgcgtcggcggcgactttaaatttcgccgtcgccccgaccgcggccccgagcgaaatctggcagcatccgtaccgacgcaactcgcacatcatgtccatcgttttcgtcgcgcccacgctcgttcgaaggcgcctcgcgatgctgacaaagtctgtaattttccgctcgatgaacatcgcccgcccgcacgcgtcatacgtctccagcgcgctatcgtcgctatcatcagactcatccgcgtacgcgttcacatccaccgcattcataccttcgggatatcccagttgtttgctcagcctttcttccgcgactttgtgtctcgcgcgtttcgcttccaatttcgcctcgcgtctcgcgcggcggcgttcaatctcgtcgtcttcctccgcgacctcgaccgcgcgccgcgcctcagcctcagccgcttccgcagccttccgctcgtccagttccacgcgcgcgcgcaatttcttcatcacggcttcgcactcatcccgatcttgtccgcactcgtcgcatcgaatcgcctcggcgtacgcgctcagcgcctccacctccgccccgctcgccgcgcgcgcttgccccaaccgaaaccacgccttatgccacgtcggcgcgttcctcacgcacgccctcgcgtcttccagcgctcgcgccgcgtcgccgtcctcaccccgtcgcaaccgcgccagcgctcgattacacagcgcaaactgattccgcgcgtcgatctccagcgcgcgcgtgaagcacgcaatcgcttcgccgtaatccccccttccgtacgcctcgctccccgcgacgtgtttcgcgcgtcccgcgcgcatgacgcgcgcgcgctcgaacggcgtccacgtcttcgccatgcgtcgccgtctcccgcgcgtcgtcgcgcgccgtcgcgccntcgacgcgcgcncgcngncttcntcgcggcgaccgttactaaaaaaacgctccgaaaatcacgacgcgaccgcggcgaccgaccgaggtgcggtcgacgaccgatcgcgccgacgcgcgagtcgccgacgcgcgcgcgcgatgccgcgcgcggcgatcgccgacgcggtgctccgcgtcgtcgtcctgctctacccggggtacctgacgtacaagacgctcgagcacgaccgcaagcgcgcggacaacgcgcgcgggtggtgcgtgtactgggtcgtcgcgagcgcgtggatggcggcgcagccggcgctggatcgcgcgttcgggggacgagcggtgatgtattgggagtgtaaggtgcgccggtgaccgccgggacgggacgggacgcgcgcgacgcgcggacgcgcgcggaggattcgaatatcgaaggactgacgcgcgcggcgcaggtggcgtttagcgtctatctctggcatccgaggtttcagggcgcgctgtacgtgtacgataggttcttagcgccgatcttggtcgcgaacgagtcgcgcgtcgatcacgcgctggcgacgacgttcgagcgcgtcgggacgcacgggggcgcggcgctcgccgccgcgcggcggttcgcgcgacggtacgcgaacgacgcgctcgccaaggcgaccgaggcgcagttacagcagcaagccgacgcgcccgcggcgagcggacgcgctgatagagtagtcaccgcgcgcaccgcgagggaggtgcgctcgtagacgacgtcatcgtcgtaagtttgtatcggagcgtcgtctcgtcttcccctcgcgcgcgctcgtcgtctcgtcactcacccgcgcgacgtcgccatgccctcgagcgcgcgtccgacgatggtcggcgccgacccgatcgccgcgccgctcgcgcacgtcgccctgctgctctgcgcgctcgcgccgaccgtcgcggtcgtcgatcccaacgcccagatcgtcgccgtgagcacgctgagcgtcgtcgccggcgcgtaccgaagcgtgcgaccggcgagcgagggctcgggagaggtcatgaccaaggaagacgcgcaaaagttccctctgctcgggtcgtgcgtgctgttcggggcgtttctggcgttcaagtttttgcccaaaaacgtgctcgacgtgtgcgcgacggcgtactttgggatgctcggcgtcgtggcgatgagcgcgatcctgaccccggtcgtgcacaaatttgcgttcgggggacgcgagctcgtgagctacgaactgttttcggtgccggagatgaagtgggtgaacggcgagcggtggacggcggagtgcacgctggcggaggcggcggcgggcgtcgcggcgttggcgggaacggcggcgtacgttcgttcgcgtcattggttggcgaataatgcgctgggaatgtcgtttgcgctgcaaggaatcgagtatttgacgattgatagcgtgcagatcgggtcaatcttgctcgcggggttgttcgtgtacgacgtgttttgggtgttttgcacgccggtgatggtgagcgtggcgcggtcgttcgacgcgccgatcaagctacttttcccgcgagtcgccgccagtgcgatcgagggcgctgatggaccgtttagcatgctaggtctgggggatatcgtcgttccagggctttacgtggcgatgattttgaggatggacaacgcgagacgcgcggcggcgctcgagccgagaaagtcgctcacgagatcggcgtccaaaaaagctgcgaccgcctctcgaacggtccgcgacgacggaaagactgtgacaacgtatttccccgccgtcgcgttcggctatctcgtcgggatcgtcaccaccatcgtcgtcatgaacgtctttgacgccgcccaaccggcgctgttgtacatcgtcccgggcgtcctcggcgccaccttcattcgcgccgctctggcgaaagaagtcggcgtgacgtggaattactgcgaaggattagaagaggcccaggccgagcgcgacgccgcggaagccaag
